(19) United States
(12) Patent Application Publication
(10) Pub. No.: US 2007/0020737 A1
(43) Pub. Date: Jan. 25, 2007

(54) Hyaluronan synthases and methods of making and using same

(76) Inventors: Philip E. Pummill, Oklahoma City, OK (US); Paul L. DeAngelis, Edmond, OK (US); Paul H. Weigel, Edmond, OK (US)

Correspondence Address: DUNLAP, CODDING & ROGERS P.C., PO BOX 16370, OKLAHOMA CITY, OK, 73113, US

(21) Appl. No.: 11/495,989

(22) Filed: Jul. 28, 2006

Related U.S. Application Data
(63) Continuation-in-part of application No. 11/444,093, filed on May 31, 2006.
Application No. 11/444,093 is a continuation of application No. 10/309,560, filed on Dec. 3, 2002, now Pat. No. 7,094,581.
Application No. 11/444,093 is a continuation-in-part of application No. 10/011,771, filed on Dec. 11, 2001, now Pat. No. 7,109,011.
(60) Provisional application No. 60/704,003, filed on Jul. 29, 2005.
(60) Provisional application No. 60/336,105, filed on Dec. 3, 2001.

(51) Int. Cl. C12P 19/28; C07H 21/04; C08B 37/00; C12P 21/06; C12N 9/24; C12N 15/74; C12N 1/21

(52) U.S. Cl. 435/85; 435/69.1; 435/200; 435/252.33; 435/471; 536/23.2; 536/53

(57) ABSTRACT

A functionally active hyaluronan synthase having at least one modified amino acid residue therein as compared to a corresponding functionally active native hyaluronan synthase such that the functionally active hyaluronan synthase has an altered enzymatic activity as compared to the corresponding functionally active native hyaluronan synthase is disclosed. The altered enzymatic activity may result in increased or decreased activity when compared to the corresponding native hyaluronan synthase, or the altered enzymatic activity may result in production of hyaluronan having an average molecular mass that is greater than or less than an average molecular mass of hyaluronan produced by the corresponding native hyaluronan synthase. Methods of producing hyaluronic acid utilizing a recombinant host cell having an expression construct encoding the functionally active hyaluronan synthase with altered enzymatic activity are also disclosed.

### CROSS-REFERENCE TO RELATED APPLICATIONS

[0001] This application claims benefit under 35 U.S.C. 119(e) of U.S. Ser. No. 60/704,003, filed Jul. 29, 2005, the contents of which are hereby expressly incorporated herein by reference.

[0002] This application is also a continuation-in-part of U.S. Ser. No. 11/444,093, filed May 31, 2006; which is a continuation of U.S. Ser. No. 10/309,560, filed Dec. 3, 2002; which claims benefit under 35 U.S.C. 119(e) of U.S. Ser. No. 60/336,105, filed Dec. 3, 2001; the contents of which are hereby expressly incorporated herein by reference.

[0003] Said U.S. Ser. No. 10/309,560 is also a continuation-in-part of U.S. Ser. No. 10/011,771, filed Dec. 11, 2001; the contents of which are hereby expressly incorporated herein by reference.

### STATEMENT REGARDING FEDERALLY SPONSORED RESEARCH OR DEVELOPMENT

[0004] This application was supported in part by a grant from the National Institutes of Health (GM35978). The United States Government may have rights in and to this application by virtue of this funding.

### BACKGROUND OF THE INVENTION

[0005] 1. Field of the Invention

[0006] The present invention relates to nucleic acid segments having coding regions encoding enzymatically active hyaluronate synthase (HAS), and to the use of these nucleic acid segments in the preparation of recombinant cells which produce hyaluronate synthase and its hyaluronic acid product. Hyaluronate is also known as hyaluronic acid or hyaluronan. More particularly, but not by way of limitation, the nucleic acid segments disclosed and claimed herein have at least one mutation as compared to the native nucleic acid segments such that the at least one mutation results in kinetic or enzymatic changes/modifications to the resulting enzyme.

[0007] 2. Brief Description of the Related Art

[0008] The incidence of streptococcal infections is a major health and economic problem worldwide, particularly in developing countries. One reason for this is due to the ability of Streptococcal bacteria to grow undetected by the body's phagocytic cells, i.e., macrophages and polymorphonuclear cells (PMNs). These cells are responsible for recognizing and engulfing foreign microorganisms. One effective way the bacteria evades surveillance is by coating themselves with polysaccharide capsules, such as a hyaluronic acid (HA) capsule. The structure of HA is identical in both prokaryotes and eukaryotes.

[0009] Since HA is generally nonimmunogenic, the encapsulated bacteria do not elicit an immune response and are therefore not targeted for destruction. Moreover, the capsule exerts an antiphagocytic effect on PMNs in vitro and prevents attachment of Streptococcus to macrophages. Precisely because of this, in Group A and Group C Streptococci, the HA capsules are major virulence factors in natural and experimental infections. Group A Streptococcus are responsible for numerous human diseases including pharyngitis, impetigo, deep tissue infections, rheumatic fever and a toxic shock-like syndrome. The Group C Streptococcus equisimilis is responsible for osteomyelitis, pharyngitis, brain abscesses, and pneumonia.

[0010] Structurally, HA is a high molecular weight linear polysaccharide of repeating disaccharide units consisting of N-acetylglucosamine (GlcNAc) and glucuronic acid (GlcUA). The number of repeating disaccharides in an HA molecule can exceed 30,000, a Mᵣ>10⁷. HA is the only glycosaminogylcan synthesized by both mammalian and bacterial cells, particularly Groups A and C Streptococci and Type A Pasteurella multocida. These strains make HA which is secreted into the medium as well as HA capsules. The mechanism by which these bacteria synthesize HA is of broad interest medicinally since the production of the HA capsule is a very efficient and clever method that bacteria use to evade surveillance by the immune system. Additionally, organic or inorganic molecules coated with HA have properties allowing them to escape detection and destruction by a host's immune system.

[0011] HA is synthesized by mammalian and bacterial cells by the enzyme hyaluronate synthase which has been localized to the plasma membrane. It is believed that the synthesis of HA in these organisms is a multi-step process. Initiation involves binding of an initial precursor, UDP-GlcNAc or UDP-GlcUA. This is followed by elongation which involves alternate addition of the two sugars to the growing oligosaccharide chain. The growing polymer is extruded across the plasma membrane region of the cell and into the extracellular space.

[0012] HA has been identified in virtually every tissue in vertebrates and has achieved widespread use in various clinical applications, most notably and appropriately as an intra-articular matrix supplement and in eye surgery. The scientific literature has also shown a transition from the original perception that HA is primarily a passive structural component in the matrix of a few connective tissues and in the capsule of certain strains of bacteria to a recognition that this ubiquitous macromolecule is dynamically involved in many biological processes: from modulating cell migration and differentiation during embryogenesis to regulation of extracellular matrix organization and metabolism to important roles in the complex processes of metastasis, wound healing, and inflammation. Further, it is becoming clear that HA is highly metabolically active and that cells focus much attention on the processes of its synthesis and catabolism. For example, the half-life of HA in tissues ranges from 1 to 3 weeks in cartilage to <1 day in epidermis. HA is also used in numerous technical applications (e.g., lubricating compounds), cosmetics and neutraceuticals.

[0013] It is now clear that a single protein utilizes both sugar substrates to synthesize HA, i.e., that HA synthases are single enzymes that have dual catalytic properties. The abbreviation HAS, for HA synthase, has gained widespread support for designating this class of enzymes. Markovitz et al. (1959) successfully characterized the HAS activity from Streptococcus pyogenes and discovered the enzymes's membrane localization and its requirements for sugar nucleotide precursors and Mg²⁺. Prehm (1983) found that elongating HA, made by B6 cells, was digested by hyaluronidase added to the medium and proposed that HAS resides at the plasma membrane. Philipson and Schwartz (1984) also showed that HAS activity cofractionated with plasma membrane markers in mouse oligodendroglioma cells.

[0014] HAS assembles high Mᵣ HA that is simultaneously extruded through the membrane into the extracellular space (or to make the cell capsule in the case of bacteria) as glycosaminoglycan synthesis proceeds. This mode of biosynthesis is unique among macromolecules since nucleic acids, proteins, and lipids are synthesized in the nucleus, endoplasmic reticulum/Golgi, cytoplasm, or mitochondria. The extrusion of the growing chain into the extracellular space also allows for unconstrained polymer growth, thereby achieving the exceptionally large size of HA, whereas confinement of synthesis within a Golgi or post-Golgi compartment limits the overall amount or length of the polymers formed. High concentrations of HA within a confined lumen may also create a high viscosity environment that might be deleterious for other organelle functions.

[0015] Several studies have attempted to solubilize, identify, and purify HAS from strains of Streptococci that make a capsular coat of HA as well as from eukaryotic cells. Although the streptococcal and murine oligodendroglioma enzymes were successfully detergent-solubilized and studied, efforts to purify an active HAS for further study or molecular cloning remained unsuccessful for decades. Prehm and Mausolf (1986) used periodate-oxidized UDP-GlcUA or UDP-GlcNAc to affinity label a protein of ˜52 kDa in streptococcal membranes that co-purified with HAS. This led to a report claiming that the Group C streptococcal HAS had been cloned, which was unfortunately erroneous. This study failed to demonstrate expression of an active synthase and may have actually cloned a peptide transporter. Triscott and van de Rijn (1986) used digitonin to solubilize HAS from streptococcal membranes in an active form. Van de Rijn and Drake (1992) selectively radiolabeled three streptococcal membrane proteins of 42, 33, and 27 kDa with 5-azido-UDP-GlcUA and suggested that the 33-kDa protein was HAS. As shown later, however, HAS actually turned out to be the 42-kDa protein.

[0016] Despite these efforts, progress in understanding the regulation and mechanisms of HA synthesis was essentially stalled, since there were no molecular probes for HAS mRNA or HAS protein. A major breakthrough occurred in 1993 when DeAngelis et al. (1993a and 1993b) reported the molecular cloning and characterization of the Group A streptococcal gene encoding the protein HasA. This gene was known to be part of an operon required for bacterial HA synthesis, although the function of this protein, which is now designated as spHAS (the S. pyogenes HAS), was unknown. spHAS was subsequently proven to be responsible for HA elongation (DeAngelis and Weigel, 1994) and was the first glycosaminoglycan synthase identified and cloned and then successfully expressed. The S. pyogenes HA synthesis operon encodes two other proteins. HasB is a UDP-glucose dehydrogenase, which is required to convert UDP-glucose to UDP-GlcUA, one of the substrates for HA synthesis. HasC is a UDP-glucose pyrophosphorylase, which is required to convert glucose 1-phosphate and UTP to UDP-glucose. Co-transfection of both hasA and hasB genes into either acapsular Streptococcus strains or Enteroccus faecalis conferred them with the ability to synthesize HA and form a capsule. This provided the first strong evidence that spHAS (hasA) was an HA synthase. The spHAS was identified and is disclosed in detail in U.S. Ser. No. 09/146,893, filed Sep. 3, 1998, now U.S. Pat. No. 6,455,304, the contents of which are expressly incorporated herein in their entirety by reference.

[0017] The elusive HA synthase gene was finally cloned by a transposon mutagenesis approach, in which an acapsular mutant Group A strain was created containing a transposon interruption of the HA synthesis operon. Known sequences of the transposon allowed the region of the junction with streptococcal DNA to be identified and then cloned from wild-type cells. The encoded spHAS was 5-10% identical to a family of yeast chitin synthases and 30% identical to the Xenopus laevis protein DG42 whose function was unknown at the time (developmentally expressed during gastrulation), DeAngelis, et al. 1994. DeAngelis and Weigel (1994) expressed the active recombinant spHAS in Escherichia coli and showed that this single purified gene product synthesizes high Mᵣ HA when incubated in vitro with UDP-GlcUA and UDP-GlcNAc, thereby showing that both glycosyltransferase activities required for HA synthesis are catalyzed by the same protein, as first proposed in 1959. Utilizing the knowledge that (i) spHAS was a dual action single enzyme, and (ii) the areas of sequence homology between the spHAS, chitin synthase, and DG42, the almost simultaneous identification of eukaryotic HAS cDNAs in 1996 by four laboratories, further strengthened the inventor's protein hypothesis that HAS is a multigene family encoding distinct isozymes. Two genes (HAS1 and HAS2) were quickly discovered in mammals, and a third gene HAS3 was later discovered. A second streptococcal seHAS or Streptococcus equisimilis hyaluronate synthase, was identified and is disclosed in detail in U.S. Ser. No. 09/469,200, filed Dec. 21, 1999, the contents of which are expressly incorporated herein in their entirety by reference. The seHAS protein has a high level of identity (approximately 70 percent) to the spHAS enzyme. This identity, however, is interesting because the seHAS gene does not cross-hybridize to the spHAS gene.

[0018] Membranes prepared from E. coli expressing recombinant seHAS synthesize HA when both substrates are provided. The results confirm that the earlier report of Lansing et al. (1993) claiming to have cloned the Group C HAS was wrong. Unfortunately, several studies have employed antibodies to this uncharacterized 52-kDa streptococcal protein to investigate what was believed to be eukaryotic HAS.

[0019] Itano and Kimata (1996a) used expression cloning in a mutant mouse mammary carcinoma cell line, unable to synthesize HA, to clone the first putative mammalian HAS cDNA (mmHAS1). Subclones defective in HA synthesis fell into three separate classes that were complementary for HA synthesis in somatic cell fusion experiments, suggesting that at least three proteins are required. Two of these classes maintained some HA synthetic activity, whereas one showed none. The latter cell line was used in transient transfection experiments with cDNA prepared from the parental cells to identify a single protein that restored HA synthetic activity. Sequence analyses revealed a deduced primary structure for a protein of ˜65 kDa with a predicted membrane topology similar to that of spHAS. mmHAS1 is 30% identical to spHAS and 55% identical to DG42. The same month this report appeared, three other groups submitted papers describing cDNAs encoding what was initially thought to be the same mouse and human enzyme. However, through an extraordinary circumstance, each of the four laboratories had discovered a separate HAS isozyme in both species.

[0020] Using a similar functional cloning approach to that of Itano and Kimata, Shyjan et al. (1996) identified the human homolog of HAS1. A mesenteric lymph node cDNA library was used to transfect murine mucosal T lymphocytes that were then screened for their ability to adhere in a rosette assay. Adhesion of one transfectant was inhibited by antisera to CD44, a known cell surface HA-binding protein, and was abrogated directly by pretreatment with hyaluronidase. Thus, rosetting by this transfectant required synthesis of HA. Cloning and sequencing of the responsible cDNA identified hsHAS1. Itano and Kimata (1996b) also reported a human HAS1 cDNA isolated from a fetal brain library. The hsHAS1 cDNAs reported by the two groups, however, differ in length; they encode a 578 or a 543 amino acid protein, respectively. HAS activity has only been demonstrated for the longer form.

[0021] Based on the molecular identification of spHAS as an authentic HA synthase and regions of near identity among DG42, spHAS, and NodC (a β-GlcNAc transferase nodulation factor in Rhizobium), Spicer et al. (1996) used a degenerate RT-PCR approach to clone a mouse embryo cDNA encoding a second distinct enzyme, which is designated mmHAS2. Transfection of mmHAS2 cDNA into COS cells directed de novo production of an HA cell coat detected by a particle exclusion assay, thereby providing strong evidence that the HAS2 protein can synthesize HA. Using a similar approach, Watanabe and Yamaguchi (1996) screened a human fetal brain cDNA library to identify hsHAS2. Fulop et al. independently used a similar strategy to identify mmHAS2 in RNA isolated from ovarian cumulus cells actively synthesizing HA, a critical process for normal cumulus oophorus expansion in the pre-ovulatory follicle. Cumulus cell-oocyte complexes were isolated from mice immediately after initiating an ovulatory cycle, before HA synthesis begins, and at later times when HA synthesis is just beginning (3 h) or already apparent (4 h). RT-PCR showed that HAS2 mRNA was absent initially but expressed at high levels 34 h later suggesting that transcription of HAS2 regulates HA synthesis in this process. Both mmHAS2 and hsHAS2 are 552 amino acids in length and are 98% identical. mmHAS1 is 583 amino acids long and 95% identical to hsHAS1, which is 578 amino acids long.

[0022] Spicer et al. (1998) used a PCR approach to identify a third HAS gene in mammals. The mmHAS3 protein is 554 amino acids long and 59, 71, 56, and 28% identical, respectively, to mmHAS1, mmHAS2, DG42, and spHAS. Spicer et al. have also localized the three human and mouse genes to three different chromosomes (HAS1 to hsChr 19/mmChr 17; HAS2 to hsChr 8/mmChr 15; HAS3 to hsChr 16/mmChr 8). Localization of the three HAS genes on different chromosomes and the appearance of HA throughout the vertebrate class suggest that this gene family is ancient and that isozymes appeared by duplication early in the evolution of vertebrates. The high identity (˜30%) between the bacterial and eukaryotic HASs also suggests that the two had a common ancestral gene. Perhaps primitive bacteria usurped the HAS gene from an early vertebrate ancestor before the eukaryotic gene products became larger and more complex. Alternatively, the bacteria could have obtained a larger vertebrate HAS gene and deleted regulatory sequences nonessential for enzyme activity.

[0023] The discovery of X. laevis DG42 by Dawid and co-workers played a significant role in these recent developments, even though this protein was not known to be an HA synthase. Nonetheless, that DG42 and spHAS were 30% identical was critical for designing oligonucleotides that allowed identification of mammalian HAS2. Ironically, definitive evidence that DG42 is a bona fide HA synthase was reported only after the discoveries of the Mammalian isozymes, when DeAngelis and Achyuthan (1996) expressed the recombinant protein in yeast (an organism that cannot synthesize HA) and showed that it synthesizes HA when isolated membranes are provided with the two substrates. Meyer and Kreil (1996) also showed that lysates from cells transfected with cDNA for DG42 synthesize elevated levels of HA. Now that its function is known, DG42 can, therefore, be designated xlHAS.

[0024] There are common predicted structural features shared by all the HAS proteins, including a large central domain and clusters of 2-3 transmembrane or membrane-associated domains at both the amino and carboxyl ends of the protein. The central domain, which comprises up to ˜88% of the predicted intracellular HAS protein sequences, probably contains the catalytic regions of the enzyme. This predicted central domain is 264 amino acids long in spHAS (63% of the total protein) and 307-328 residues long in the eukaryotic HAS members (54-56% of the total protein). The exact number and orientation of membrane domains and the topological organization of extracellular and intracellular loops has been determined experimentally for spHAS and will be described in detail herein with respect to FIG. 14.

[0025] spHAS is a HAS family member that has been purified and partially characterized. Initial studies using spHAS/alkaline phosphatase fusion proteins indicate that the N terminus, C terminus, and the large central domain of spHAS are, in fact, inside the cell. spHAS has 6 cysteines, whereas HAS1, HAS2, and HAS3 have 13, 14 and 14 Cys residues, respectively. Two of the 6 Cys residues in spHAS are conserved and identical in HAS1 and HAS2. Only one conserved Cys residue is found at the same position (Cys-225 in spHAS) in all the HAS family members. This may be an essential Cys whose modification by sulfhydryl poisons partially inhibits enzyme activity. The possible presence of disulfide bonds or the identification of critical Cys residues needed for any of the multiple HAS functions noted below has not yet been elucidated for any members of the HAS family.

[0026] In addition to the proposed unique mode of synthesis at the plasma membrane, the HAS enzyme family is highly unusual in the large number of functions required for the overall polymerization of HA. At least six discrete activities are present within the HAS enzyme: binding sites for each of the two different sugar nucleotide precursors (UDP-GlcNAc and UDP-GlcUA), two different glycosyltransferase activities, one or more binding sites that anchor the growing HA polymer to the enzyme (perhaps related to a B-X₇-B motif), and a ratchet-like transfer mechanism that moves the growing polymer one or two sugars at a time. This later activity is likely coincident with the stepwise advance of the polymer through the membrane. All of these functions, and perhaps others as yet unknown, are present in a relatively small protein ranging in size from 417 (seHAS) to 588 (xlHAS) amino acids.

[0027] Although all the available evidence supports the conclusion that only the spHAS protein is required for HA biosynthesis in bacteria or in vitro, it is possible that the larger eukaryotic HAS family members are part of multicomponent complexes. Since the eukaryotic HAS proteins are ˜40% larger than spHAS, their additional protein domains could be involved in more elaborate functions, such as intracellular trafficking and localization, regulation of enzyme activity, and mediating interactions with other cellular components.

[0028] The unexpected finding that there are multiple vertebrate HAS genes encoding different synthases strongly supports the emerging consensus that HA is an important regulator of cell behavior and not simply a structural component in tissues. Thus, in less than six months, the field moved from one known, cloned HAS (spHAS) to recognition of a multigene family that promises rapid, numerous, and exciting future advances in our understanding of the synthesis and biology of HA.

[0029] For example, disclosed herein are the nucleotide sequences of HAS genes as well as the amino acid sequences encoded therein from Streptococcus equisimilis (SEQ ID NOS: 1 and 2, respectively), Streptococcus pyogenes (SEQ ID NOS:3 and 4, respectively), Streptococcus uberis (SEQ ID NOS:5 and 6, respectively), Pasteurella multocida (SEQ ID NOS:7 and 8, respectively), Xenopus laevis (SEQ ID NOS:9 and 10, respectively), Paramecium bursaria Chlorella virus (PBCV-1; SEQ ID NOS:11 and 12, respectively), and Sulfolobus solfataricus (SEQ ID NOS:13 and 14, respectively). The presence of hyaluronan synthase in these systems and the purification and use of the hyaluronan synthase from these different systems indicates an ability to purify and isolate nucleic acid sequences encoding enzymatically active hyaluronan synthase in many different prokaryotic and viral sources, indeed, from microbial sources in general.

[0030] Group C Streptococcus equisimilis strain D181 synthesizes and secretes hyaluronic acid (HA). Investigators have used this strain and Group A Streptococcus pyogenes strains, such as S43 and A111, to study the biosynthesis of HA and to characterize the HA-synthesizing activity in terms of its divalent cation requirement, precursor (UDP-GlcNAc and UDP-GlcUA) utilization, and optimum pH.

[0031] Traditionally, HA has been prepared commercially by isolation from either rooster combs or extracellular media from Streptococcal cultures. One method which has been developed for preparing HA is through the use of cultures of HA-producing Streptococcal bacteria. U.S. Pat. No. 4,517,295, the contents of which are herein incorporated by reference in their entirety, describes such a procedure wherein HA-producing Streptococci are fermented under anaerobic conditions in a CO₂-enriched growth medium. Under these conditions, HA is produced and can be extracted from the broth. It is generally felt that isolation of HA from rooster combs is laborious and difficult, since one starts with HA in a less pure state. The advantage of isolation from rooster combs is that the HA produced is of higher molecular weight. However, preparation of HA by bacterial fermentation is easier, since the HA is of higher purity to start with. Usually, however, the molecular weight of HA produced in this way is smaller than that from rooster combs. Additionally, HA prepared by Streptococcal fermentation oftentimes elicits immune responses as does HA obtained from rooster combs. Therefore, a technique that allows for the production of high molecular weight HA by bacterial fermentation would be a distinct improvement over existing procedures.

[0032] As mentioned previously, high molecular weight HA has a wide variety of useful applications—ranging from cosmetics to eye surgery. Due to its potential for high viscosity and its high biocompatibility, HA finds particular application in eye surgery as a replacement for vitreous fluid. HA has also been used to treat racehorses for traumatic arthritis by intra-articular injections of HA, in shaving cream as a lubricant, and in a variety of cosmetic products due to its physiochemical properties of high viscosity and its ability to retain moisture for long periods of time. In fact, in August of 1997 the U.S. Food and Drug Agency approved the use of high molecular weight HA in the treatment of severe arthritis through the injection of such high molecular weight HA directly into the affected joints. In general, the higher the molecular weight of HA that is employed the better. This is because HA solution viscosity increases with the average molecular weight of the individual HA polymer molecules in the solution. Unfortunately, very high molecular weight HA, such as that ranging up to 10⁷, has been difficult to obtain by currently available isolation procedures. The recombinant methods of production disclosed herein, however, allow for the production of HA having an average molecular mass of up to 10⁷ and greater.

[0033] To address these or other difficulties, there is a need for new methods and constructs that can be used to produce HA having one or more improved properties such as greater purity, ease of preparation or desired product size. In particular, there is a need to develop methodology for the production of larger amounts of relatively high molecular weight and relatively pure HA than is currently commercially available. There is yet another need to be able to develop methodology for the production of HA having a modified size distribution (HA_{Δsize}) as well as HA having a modified structure (HA_{Δmod}).

[0034] Although the streptococcal HA synthases are relatively small at <49 kDa, they mediate at least six discrete functions: the ability to bind two different sugar nucleotide precursors, to catalyze two distinct glycosyltransferase reactions, to bind the HA acceptor polymer and to translocate the growing HA chain through the enzyme and the cell membrane.

[0035] All recombinant HASs, either from vertebrates or prokaryotes, have been shown to synthesize high molecular weight HA in vitro. The class I HAS proteins likely have essentially identical topological organizations in their N-terminal regions, which are highly homologous with spHAS, the only HAS whose membrane topology has been determined experimentally.

[0036] There are six Cys residues in spHAS, four of which are conserved perfectly in seHAS and suHAS (FIG. 1); both of these latter enzymes have only four Cys residues (Kumari and Weigel, 1997; Ward et al., 2001). These four Cys residues in turn are generally conserved among the three vertebrate HAS isoenzymes (Weigel et al., 1997, and FIG. 1). However, to date the involvement of one or more of these conserved Cys residues in enzyme activity or disulfide bond formation has not been determined.

[0037] The present invention addresses one or more shortcomings in the art. Using recombinant DNA technology, methods of producing enzymatically active HAS having at least one mutation therein (as compared to the native enzyme) is disclosed and claimed in conjunction with the preparation of recombinant cells which produce HAS and its hyaluronic acid product.

### BRIEF DESCRIPTION OF THE DRAWINGS

[0038] FIG. 1. General conservation of four cysteines in seHAS within the Class I HAS protein family. The HAS protein sequences (and their accession numbers) shown are: Streptococcus equisimilis (seHAS, AAB87874, SEQ ID NO:2); Streptococcus uberis (suHAS, CAB46918, SEQ ID NO:6); Streptococcus pyogenes (spHAS, AAA17981, SEQ ID NO:4); chicken (ggHAS2, AF106940_{—}1); mouse (mmHAS1, BAA11654; mmHAS2, AAC53309; mmHAS3, AAC53128); human (hsHAS1, NP_{—}001514; hsHAS2, NP_{—}005319; hsHAS3, AF232772_{—}1); rabbit (ocHAS2, BAB63264; ocHAS3, BAB63265); bovine (btHAS2, CM06239); rat (rnHAS2, NP_{—}037285); chlorella virus (cvHAS2, AF113757_{—}1) and frog (xlHAS1, AF106940). The sequenceswere aligned using the DNAsis multiple alignment program (v4.0). Cys residues including the four in seHAS that are conserved in all three streptococcal enzymes, are in boldface. The bars highlight the sequence regions of these four conserved Cys residues within the larger HAS family. Residues that are identical in the three HASs and in some of the other family members are highlighted in dark gray. Residues in seHAS conserved among all other HAS family members are highlighted in light gray. Conserved residues that are within the active sites of all β-glycosyltransferases are indicated by a dot.

[0039] FIG. 2. Effect of NEM concentration and incubation time on the activity of seHAS and spHAS. Panel A: E. coli membranes containing recombinant seHAS or spHAS were incubated at 4° C. for 1 h with Phosphate Buffered Saline (PBS) alone (minus N-ethylmaleimide (NEM) control) or PBS containing different concentrations of NEM. The unreacted NEM was quenched by addition of dithioerythritol (DTE) to a final concentration of 1-6 mM and the samples were assayed for HAS activity as described hereinafter. Panel B: The effect of incubation time on seHAS and spHAS activity was assessed by incubating the membranes with 5 mM NEM at 4° C. for the indicated times. Aliquots were removed into assay buffer containing 5 mM DTE, and HAS activities were determined. HAS activity in control untreated membranes was stable for 1 h at 4° C. The inhibition of HAS activity is expressed as percent relative to the controls.

[0040] FIG. 3. Effect of NEM or sodium arsenite treatment on the utilization of UDP-GlcUA and UDP-GlcNAc by wild-type seHAS. E. coi membranes containing seHAS protein were incubated at 4° C. for 1 h in PBS containing 5 mM NEM or 10 mM Sodium Arsenite (SodArs), and the control membranes were incubated with PBS alone. Michaelis-Menten constants (Kₘ) were calculated from the activities of seHAS at varying concentrations of UDP-GlcUA or UDP-GlcNAc.

[0041] FIG. 4. Relative enzyme activities of the Cys-to-Ala or Cys-to-Ser single Cys-mutants of seHAS. Membranes from E. coli (SURE) cells expressing either wild-type seHAS or the indicated single Cys-mutants of seHAS were assayed for HAS activity under linear conditions with respect to time and protein concentration, and the amount of HAS protein expressed in each membrane preparation was determined as described hereinafter. The normalized seHAS specific activities were calculated as nmol of UDP-GlcUA incorporated per pmol of HAS per hour. The specific activities of seHAS mutants are given as a percent relative to wild-type activity as 100%.

[0042] FIG. 5. Relative enzyme activities of the Cys-to-Ala multiple Cys-mutants of seHAS. Membranes expressing wild-type seHAS, the indicated multiple Cys-mutants of seHAS or the seHAS^{Cys-null} were assayed and normalized as described in FIG. 4.

[0043] FIG. 6. Substrates protect triple Cys-mutants of seHAS from inactivation by NEM. E. coli membranes containing the indicated triple Cys-mutant of seHAS (each with a single remaining Cys residue) were treated at 4 C for 10 min with no additions (control; 100% values) or with 5 mM NEM alone and in the presence of either UDP, UDP-GlcUA or UDP-GlcNAc. Unreacted NEM was then quenched and HAS activity was determined. Results are not shown for the mutant containing only Cys³⁶⁷, since NEM inactivation of this mutant is ˜10% and all values were essentially identical.

[0044] FIG. 7. Relative sizes of HA synthesized by wild-type seHAS and the Cys-mutants of seHAS. E. coli membranes containing wild-type or the 19 Cys-mutants of seHAS were incubated with UDP-[¹⁴C]GlcUA and the othercomponents described hereinafterforthe assay of HAS activity. The ¹⁴C-labeled HA products were then recovered and analyzed by agarose gel electrophoresis and autoradiography as described hereinafter. The molecular weight markers used were the indicated DNA fragments of defined length (kb). A 7 kb DNA fragment corresponds to an HA molecular weight of approximately 10⁶ (32). SeHAS variants shown are as follows. Panel A: Lane 1, C226A; Lane 2, C262A; Lane 3, C281A; Lane 4, C367A; Lane 5, wild-type; lane 6, C226S; Lane 7, C262S; Lane 8, C281S; Lane 9, C367S. Panel B: Lane 1, C(226,262)A; Lane 2, C(226,281)A; Lane 3, C(226,367)A; Lane 4, C(262,281)A; Lane 5, C(262,367)A; Lane 6, C(281,367)A; Lane 7, wild-type; Lane8, (Δ3C)C²⁶²; Lane 9, (Δ3C)C²⁸¹; Lane 10, (Δ3C)C³⁶⁷; Lane 11, seHAS^{Cys-null}; Lane 12, (Δ3C)C²²⁶.

[0045] FIG. 8. Reactivity of ¹⁴C-NEM with the Cys-to-Ala double mutants of seHAS. E. coli membranes containing wild-type or double Cys-mutants of seHAS were incubated in two separate experiments (panels A and B) with 2.5 mM ¹⁴C-NEM (8×10⁶ dpm) at 4° C. for 10 min. The excess of ¹⁴C-NEM was quenched by addition of 40 mM DTE and incubation for 5 min at 4° C. Trichloroacetic acid was added to a final concentration of 10%, and the samples were incubated at 4° C. overnight. The membrane pellet was washed by centrifugation 3 times with 5% TCA, suspended in 20 μl of Laemmli sample buffer (33) and neutralized with sodium hydroxide. The samples were heated at 95° C. for 3 minutes and subjected to SDS-PAGE. The gels were processed and analyzed as described hereinafter.

[0046] FIG. 9. MALDI-TOF mass spectrographs of seHAS-His₆ derivatives covalently modified by a sulfhydryl reagent. Wild-type seHAS-His₆ (panel A) or seHAS-His_{Cys-null} (panel B) were incubated with (the upper traces in each panel) or without (lower traces in each panel) biotin-PEO-maleimide, and the eluted proteins were then prepared for mass analysis as described hereinafter. The predicted mass-to-charge ratios for covalent adducts containing 2, 3 or 4 biotin-PEO-maleimide groups perwild-type enzyme molecule (in parentheses) and the observed centroid mass-to-charge ratios are indicated above the peaks. The predicted m/z ratio for the (MH)⁺ ion of unmodified seHAS^{Cys-null}-His₆ (with four Ala residues replacing the four Cys residues) is 48,473.1.

[0047] FIG. 10. Kinetic analysis of UDP-GlcUA utilization by Cys-mutants of spHAS. Membranes prepared from cells expressing the indicated spHAS mutant were assayed as described hereinafter to assess the Michaelis-Menton constants for UDP-GlcUA: wildtype (□), C(124,366,402)A (▾), C(124,261,280,366,402)A (▴), and the Cys-null mutant (602 ).

[0048] FIG. 11. Hill analysis of UDP-GlcNAc utilization by Cys-mutants of spHAS. Hill plots of data obtained from Kₘ assays of wildtype and several mutant spHAS proteins, performed as in FIG. 10, demonstrate that the cooperative nature of UDP-GlcNAc utilization is not affected by alteration of Cys residues. The spHAS variants shown are: wildtype (□), C(124,366,402)A (▾), C(124,261,280,366,402)A (▴), and the Cys-null mutant (∘).

[0049] FIG. 12. Inhibition of wildtype and Cys-mutants of spHAS by NEM. The activity of the indicated spHAS enzymes in membranes was assessed after pretreatment with (gray bars) or without (black bars) 20 mM NEM at room temperature for 90 min. Wildtype and many of the Cys-mutant variants of spHAS with multiple Cys residues mutated are still sensitive to NEM inhibition. The mutant containing only one Cys residue at Cys²²⁵ and the Cys-null mutant were not sensitive to NEM inhibition.

[0050] FIG. 13. MALDI-TOF mass spectrographs of spHAS-His₆ covalently modified by a sulfhydryl reagent. Wildtype spHAS-His₆ (panel A) or the Cys-null mutant of spHAS-His₆ (panel B) were bound to Ni⁺²-NTA resin, washed and incubated for 2 h at 4° C. with (the upper traces in each panel) or without (lower traces in each panel) 10 mg/ml biotin-PEO-maleimide. The columns were washed and the proteins were then eluted and prepared for mass analysis as described hereinafter. The centroid mass-to-charge ratios are indicated above the observed peaks and the predicted mass-to-charge ratios for covalent adducts containing 2, 3, 4, 5 or 6 biotin-PEO-maleimide groups per wildtype enzyme molecule are indicated in parentheses. The predicted m/z ratio for the (MH)⁺ ion of unmodified spHAS^{Cys-null}-His₆ (with six Ala residues replacing the six Cys residues) is 48,484.4.

[0051] FIG. 14. Alignment of seHAs, spHAS and suHAS sequences (FIG. 14A), and topological organization of spHAS and probably all Class I HASs (FIGS. 14B and C). Membrane domains (MDs) are numbered 1-6 starting from the N-terminus. FIG. 14B: the orientation of MD1 through MD6 (white numbers) in seHAS, and position number of amino acids at the cytoplasmic junctions for each MD are indicated. K48 and E327 are in white circles within MD2 and MD4, respectively; the suggested interaction between the two is indicated by the dashed double-arrow. FIG. 14C: a possible organization of MD1-MD6 in which MD2 and MD4 are in contact (with K48 and E327 indicated in the white box). The black area within the MD cluster denotes the putative intramolecular pore, through which a growing HA chain is translocated across the membrane. In both panels, the cell interior is at the bottom.

[0052] FIG. 15. seHAS mutants at K48 and E327. Sequence alignments show K48 of seHAS within MD2 (using the nomenclature in FIG. 14). Note that seHAS and spHAS contain 417 and 419 amino acids, respectively, and their numbering is not identical. The analogous position in spHAS is also Lys, and in the eukaryotic HASs this is a conserved polar residue: Gin, which could be involved in one or more H-bonds. MD4 contains an absolutely conserved Glu residue in the Class I HAS family, which is E327 in seHAS.

[0053] FIG. 16. Expression and quantitation of recombinant seHAS variants at K48 and E327 in E. coli membranes. Membranes were prepared from cells expressing wildtype or the indicated variant seHAS, subjected to SDS-PAGE and the gels were either stained with Coomassie Brilliant Blue for quantification of HAS protein expression (B) or electroblotted to nitrocellulose for detection of HAS protein by Western analysis (A). Note that the relative migration (A) of seHAS(E327D) and seHAS(K48E) were both significantly slower than wildtype seHAS (indicated by the dashed line).

[0054] FIG. 17. SEC analysis of HA synthesized by membrane-bound wildtype seHAS or seHAS variants. Unlabeled HA was synthesized by membranes containing wildtype seHAS (WT, solid lines), or the indicated mutants and the samples were processed and analyzed by SEC-MALLS. The lines show refractive index values. (A) HA made by the E327D (dashed line) or E327Q (dotted line) seHAS mutants. (B) HA made by wildtype (WT, solid line) or the K48E (dotted line) or K48R (dashed line) seHAS mutants. (C) HA made by the double-switch seHAS(K48E,E327K) mutant (dashed line) is ˜one-sixth the size of WT HA.

[0055] FIG. 18. SEC-MALLS analysis of HA synthesized by membrane-bound wildtype seHAS or seHAS(K48E,E327K). Unlabeled HA was synthesized by membranes containing wildtype seHAS (solid line, filled circles) or the double-switch mutant (dashed line, filled triangles) and then processed and analyzed by SEC-MALLS. Light scattering data were used to determine the weight-average molar mass of the HA products (symbols). The lines show refractive index values.

[0056] FIG. 19. Gel filtration of HA product for xlHAS1 wild type and S77 mutants. The reactions were carried out using membranes as described, and analyzed with a PolySep-GFC-P 5000 (A and B) or 6000 (C-E) column. Incubation times were as follows: 2.5 min (A), 5 min (B), 15 min (C), 30 min (D), and 60 min (E). A, B, and D were stopped with 2% SDS. C and E were stopped with 0.5% SDS and treatment with Pronase followed by ultrafiltration. The data points are shown for xlHAS1 wild type (black dots; typical HA peak was 5,000-20,000 DPM [¹⁴C]GlcUA incorporation), whereas moving average trend lines represent the data for the mutants. The peaks of the 1300-, 600-, and 80-kDa MANT-labeled HA standards eluted at 11.7 (void volume), 11.7 (void volume), and 14.7 min, respectively, on the 5000 column and 13.2, 14.0, and 16.1 min, respectively, on the 6000 column.

[0057] FIG. 20. Gel filtration of HA product for xlHAS1 wild type and cysteine mutants. The reactions were carried out using membranes as described, and analyzed with a PolySep-GFC-P 5000 (A and B) or 6000 (C-E) column. Incubation times were as follows: 2.5 min (A), 5 min (B), 15 min (C), 30 min (D), and 60 min (E). A, B, and D were stopped with 2% SDS. C and E were stopped with 0.5% SDS and treatment with Pronase followed by ultrafiltration. The data points are shown for xlHAS1 wild type (black dots), whereas moving average trend lines represent the data for the mutants.

[0058] FIG. 21. Agarose gel analysis of HA product of xlHAS1 wild type and mutant enzymes. Duplicate reactions from C of FIGS. 19 and 20 (30 min) were also run on a 1.35% agarose gel and visualized as described. Lane 1, wild type xlHAS1; lane 2, Cl 17S; lane 3, C239S; lane 4, C337S; lane 5, S77F; lane 6, S77I; lane 7, S77T. The positions of the 1-kb DNA ladder standards are indicated with bars (corresponding to HA of 200, 250, 300, 400, 500, 700, and 900 kDa, from bottom to top, in size). The arrow marks the position of the sample well. Wild type xlHAS1 produced HA (WT marked with a bracket) with a size of 2-9×10⁵ Da in this experiment. The agarose gel data qualitatively corroborates the gel filtration analyses.

[0059] FIG. 22. Agarose Gel Analysis of HA produced by the seHAS ⁵¹LSF⁵³ Mutants. The enzymes indicated below were expressed in B. subtilis RB227 cells. The letters in brackets indicate the amino acids present in the ⁵¹LSF⁵³ region. After culture incubation and processing as described in the Methods, 4 μl of clarified media was loaded on a 0.6% agarose gel and electrophoresed for ˜6 hours with increasing voltage. HA was visualized by staining with Stains-All. Lanes: 1—MegaLadder; 2—HiLadder & LoLadder; 3—seHAS; 4—seHAS; 5—seHAS[FFF]; 6—seHAS[FFI]; 7—seHAS[FLT]; 8—seHAS[FTL]; 9—seHAS[FTT]; 10—seHAS[IIS]; 11—seHAS[ILF]; 12—seHAS[ISF]; 13—seHAS[ISI]; 14—seHAS[ISL]; 15—seHAS[ISS]; 16—seHAS[IST]; 17—seHAS[LIL]; 18—seHAS[LSS]; 19—seHAS[LST]; 20—seHAS[LTF]; 21—seHAS[LTT]; 22—seHAS[SFI]; 23—seHAS[STI]; 24—seHAS[TIS]; 25—seHAS[TIT]; 26—seHAS[TSI]; 27—seHAS[TSL]; 28—seHAS[TSS]; 29—seHAS[TST]; 30—seHAS[TSL].

[0060] FIG. 23. Agarose Gel Analysis of HA Produced by HAS Containing Multiple Mutation Sites. The enzymes indicated below were expressed in B. subtilis RB227 cells. After culture incubation and processing as described in the Methods, 9 μl of clarified media was loaded on a 0.6% agarose gel and electrophoresed for ˜6 hours with increasing voltage. HA was visualized by staining with Stains-All. A) Single mutants, B) Double mutants, C) Triple mutants, D) Quadruple mutants, E) Summary.

[0061] Lanes of FIG. 23A: 1—seHAS[K31S]-2; 2—seHAS[K31S]-3; 3—seHAS[K31Y]-2; 4—seHAS[K31N]-1; 5—seHAS[K31N]-3; 6—seHAS[K31T]-1; 7—seHAS[K31T]-3; 8—seHAS[T268L]-1; 9—seHAS[T268L]-3; 10—seHAS[T268I]-1; 11—seHAS[T268I]-3; 12—seHAS[T269V]-1; 13—seHAS[N317R, R353G]-2; 14—seHAS[N317I]-1; 15—seHAS[N317I]-3; 16—seHAS[N317R]-2; 1713 seHAS[G344N]-3; 18—seHAS[G344D]-2; 19—seHAS[G344E]-2; 20—seHAS[G344E]-3; 21—seHAS[G344K]-1; 22—seHAS[G344K]-2; 23—seHAS[F349C]-1; 24—seHAS[F349G]-1; 25—seHAS[F349G]-3; 26—seHAS[F349D]-2; 27—seHAS[F349Y]-2; 28—seHAS[F349Y]-3; 29—seHAS; 30—MegaLadder.

[0062] Lanes of FIG. 23B: 1—MegaLadder; 2—HiLadder; 3—seHAS; 4—seHAS[F349C]-1; 5—seHAS[F349D]-2; 6—seHAS[F349Y]-2; 7—seHAS[F349G]-1; 8—seHAS[K31T]-1; 9—seHAS[K31T, F349G]-1; 10—seHAS[K31S]-3; 11—seHAS[K31S, F349G]-2; 12—seHAS[K31N]-1; 13—seHAS[K31N, F349G]-2; 14—seHAS[K31Y]-2; 15—seHAS[T268V]-1; 16—seHAS[T268V, F349G]-3 17—seHAS[T268I]-1; 18—seHAS[T268I, F349G]-1; 19—seHAS[T268L]-1; 20—seHAS[T268L, F349G]-2; 21—seHAS[N317I]-1; 22—seHAS[N317I, F349G]-1; 23—seHAS[N317K]-6; 24—seHAS[N317K, F349G]-3; 25—seHAS[N317T]-1; 26—seHAS[N317R]-2; 27—seHAS[G344N]-3; 28—seHAS[G344D]-2; 29—seHAS[G344E]-2; 30—seHAS[G344K]-1.

[0063] Lanes of FIG. 23C: 1—MegaLadder; 2—HiLadder; 3-5 μg Genzyme HA; 4—seHAS; 5—seHAS[T268I, N317I, F349G]-1; 6—seHAS[T268I, N317I, F349G]-2; 7—seHAS[T268I, N317I, F349G]-3; 8—seHAS[T268I, N317T, F349G]-1; 9—seHAS[T268I, N317T, F349G]-2; 10—seHAS[T268I, N317R, F349G]-1; 11—seHAS[T268I, N317R, F349G]-2; 12—seHAS[T268I, N317R, F349G]-3; 13—seHAS[T268I, F349G]-1; 14—seHAS[T268I, F349G]-2; 15—seHAS[T268I, F349G]-3; 16—seHAS[T268I, N317T, F349G]-3; 17—seHAS[T268I, N317T, F349G]-4; 18—seHAS[T268I, ³¹⁵MNN³¹⁷→R, F349G]-1; 19—seHAS[T268I, ³¹⁵MNN³¹⁷→R, F349G]-2; 20—seHAS[T268I, ³¹⁵MNN³¹⁷→R, F349G]-3; 21—seHAS[T268I, trunc. @ 342]-1; 22—seHAS[268I, G344K, F349G]-1; 23—seHAS[T268I, G344K, F349G]-2; 24—seHAS[T268I, G344K, F349G]-3; 25—seHAS[T268I, G344K, F349G]-4; 26—seHAS[T268I, G344K, F349G]-5; 27—seHAS[T268I, G344K, F349G]-6; 28—seHAS[T268I, G344E, F349G]-1; 29—seHAS[T268I, G344E, F349G]-2; 30—seHAS[T268I, G344E, F349G]-3.

[0064] Lanes of FIG. 23D: 1—MegaLadder; 2—HiLadder; 3-5 μg Genzyme HA; 4—seHAS; 5—seHAS[T268I, G344K, F349G]-1; 6—seHAS[T268I, N317I, F349G]1; 7—seHAS[T268I, N317K, F349G]-1; 8—seHAS[T268I, N317K, F349G]-2; 9—seHAS[T268I, N317K, F349G]-3; 10—seHAS[T268I, N317K, F349G]4; 11—seHAS[T268I, N317K, G344K, F349G]-1; 12—seHAS[T268I, N317K, G344K, F349G]-2; 13—seHAS[T268I, N317K, G344K, F349G]-3; 14—seHAS[T268I, N317K, G344K, F349G]-4; 15—seHAS[T268I, N317R, G344K, F349G]-1; 16—seHAS[T268I, N317R, G344K, F349G]-2; 17—seHAS[T268I, N317R, G344K, F349G]-3; 18—seHAS[T268I, N317R, G344K, F349G]-4; 19—seHAS[T268I, N317T, G344K, F349G]-1; 20—seHAS[T268I, N317T, G344K, F349G]-2; 21—seHAS[T268I, N317T, G344K, F349G]-3; 22—seHAS[T268I, N317T, G344K, F349G]-4.

[0065] Lanes of FIG. 23E: 1—MegaLadder & HiLadder; 2-5 μg Genzyme HA; 3—seHAS-1; 4—seHAS-2; 5—seHAS[T268I]-1; 6—seHAS[T268I]-3; 7—seHAS[F349G]-1; 8—seHAS[F349G]-3; 9—seHAS[G344K]-1; 10—seHAS[G344K]-2; 11—seHAS[N317K]-6; 12—seHAS[N317R]-2; 13—seHAS[T268I, F349G]-1; 14—seHAS[T268I, F349G]-3; 15—seHAS[T268I, G344K, F349G]-1; 16—seHAS[T268I, G344K, F349G]-3; 17—seHAS[T268I, N317K, G344K, F349G]-1; 18—seHAS[T268I, N317K, G344K, F349G]-2; 19—seHAS[T268I, N317R, G344K, F349G]-1; 20—seHAS[T268I, N317R, G344K, F349G]-2.

### DETAILED DESCRIPTION OF THE INVENTION

[0066] Before explaining at least one embodiment of the invention in detail, it is to be understood that the invention is not limited in its application to the details of construction and the arrangement of the components set forth in the following description or illustrated in the drawings. The invention is capable of other embodiments or of being practiced or carried out in various ways. Also, it is to be understood that the phraseology and terminology employed herein is for the purpose of description and should not be regarded as limiting.

[0067] The present invention is directed to a functionally active hyaluronan synthase having at least one modified amino acid residue therein as compared to a corresponding functionally active native hyaluronan synthase. The term “modified amino acid residue” as used herein will be understood to include mutated amino acid residues as well as other modifications to amino acid residues, including but not limited to post-translational modifications of the amino acid residue, such as phosphorylations, glycosylations, methylations, prenylations, and the like. When the amino acid residue is modified by mutation, the mutation may arise by random mutagenesis ortargeted or “site directed” mutagenic techniques. For example, it may be desired to target a specific amino acid residue of the hyaluronan synthase to determine if a specific property of enzyme is affected. In one embodiment, it may be desired to target one or more Cysteines of the hyaluronan synthase to determine its involvement in disulfide bond formation or enzymatic activity of the hyaluronan synthase. In another embodiment, it may be desired to target one or more of a possible charge/polar-pair between two membrane domains to determine their involvement in anchoring. Alternatively, one may randomly mutagenize the gene encoding hyaluronan synthase and then screen or select for hyaluronan synthase mutants that produce altered amounts of HA as compared with the corresponding wild type HAS (that is, larger or smaller amounts of HA), or for hyaluronan synthase mutants that produce HA having an altered size as compared with HA produced by the corresponding wild type HAS (i.e., larger or smaller HA), without regard for the amino acid(s) that are mutated.

[0068] The terms “native” and “wild-type” are used herein interchangeably and will be understood to refer to a gene or allele that is the most frequently observed genotype and/or phenotype in nature and thus is arbitrarily designated as “normal”. Thus, a “native” or “wild-type” gene is that sequence normally found in an organism in the “wild” or “native” state.

[0069] In one embodiment of the present invention, the corresponding functionally active hyaluronan synthase is selected from the group consisting of spHAS, seHAS, suHAS, and pmHAS. The corresponding functionally active hyaluronan synthase may have an amino acid sequence essentially as set forth in at least one of SEQ ID NOS:2, 4, 6, 8, 10, 12 and 14.

[0070] In another embodiment of the present invention, at least one of the modified target amino acid residues is selected from the group consisting of an asparagine, a cysteine, a glycine, a lysine, a phenylalanine, a threonine, and combinations thereof. In a different embodiment, the functionally active hyaluronan synthase having at least one modified target amino acid residue therein has an amino acid sequence comprising at least one SEQ ID NOS: 15-160, such as but not limited to, SEQ ID NOS:15-92, SEQ ID NOS:93-98, SEQ ID NOS:99-123, or SEQ ID NOS:124-160.

[0071] Additionally, the present invention relates to a functionally active hyaluronan synthase having an altered enzymatic activity as compared to a corresponding functionally active native hyaluronan synthase. The term “altered enzymatic activity” as defined herein will be understood to refer to increased or decreased enzymatic activities, or activities that are enzymatically faster or slower than the native enzyme. In addition, the term “altered enzymatic activity” as used herein will also be understood to include enzymes that produce HA products having an altered size, that is, an HA polymer that has a an average molecular mass that is greater or less than the average molecular mass of an HA polymer produced by the native enzyme.

[0072] In a different embodiment of the present invention, the functionally active hyaluronan synthase having an altered enzymatic activity is selected from the group consisting of spHAS, seHAS, suHAS and pmHAS and has at least one modified target amino acid residue therein as compared to a corresponding functionally active native hyaluronan synthase. Further, in this embodiment of the invention, at least one of the modified target amino acid residues is selected from the group consisting of an asparagine, a cysteine, a glycine, a lysine, a phenylalanine, a threonine, and combinations thereof. In a different embodiment, the functionally active hyaluronan synthase having at least one modified target amino acid residue therein has an amino acid sequence comprising at least one SEQ ID NOS:15-160, such as but not limited to, SEQ ID NOS:15-92, SEQ ID NOS:93-98, SEQ ID NOS:99-123, or SEQ ID NOS:124-160.

[0073] Additionally, the present invention relates to a host cell having a functionally active hyaluronan synthase having an altered enzymatic activity as compared to a corresponding functionally active native hyaluronan synthase incorporated therein such that the host cell is capable of producing hyaluronan. In a separate embodiment of the present invention, the functionally active hyaluronan synthase having an altered enzyme activity is selected from the group consisting of spHAS, seHAS, suHAS, and pmHAS. Further, the functionally active hyaluronan synthase has at least one modified target amino acid therein as compared to a corresponding functionally active native hyaluronan synthase. The at least one of the modified target amino acid residues is selected from the group consisting of an asparagine, a cysteine, a glycine, a lysine, a phenylalanine, a threonine, and combinations thereof. In a different embodiment, the functionally active hyaluronan synthase having at least one modified target amino acid residue therein has an amino acid sequence comprising at least one SEQ ID NOs:15-160, such as but not limited to, SEQ ID NOS:15-92, SEQ ID NOS:93-98, SEQ ID NOS:99-123, or SEQ ID NOS:124-160.

[0074] Further, the present invention relates to a functionally active hyaluronan synthase having an amino acid sequence comprising SEQ ID NOS:15-160 such as but not limited to, SEQ ID NOS:5-92, SEQ ID NOS:93-98, SEQ ID NOS:99-123, or SEQ ID NOS:124-160. Also, the present invention relates to a functionally active hyaluronan synthase having an amino acid sequence as essentially set forth in SEQ ID NOS:15-160, such as but not limited to, SEQ ID NOS:15-92, SEQ ID NOS:93-98, SEQ ID NOS:99-123, or SEQ ID NOS:124-160.

[0075] Moreover, the present invention is directed to a method of providing a functionally active hyaluronan synthase having an altered enzymatic activity as compared to a corresponding functionally active native hyaluronan synthase. The method includes providing a hyaluronan synthase and modifying at least one target amino acid residue of the hyaluronan synthase to provide a functionally active hyaluronan synthase having an altered enzymatic activity.

[0076] In a separate embodiment of the present invention, the hyaluronan synthase is selected from the group consisting of spHAS, seHAS, suHAS, and pmHAS and the at least one modified target amino acid residue is selected from the group consisting of an asparagine, a cysteine, a glycine, a lysine, a phenylalanine, a threonine, and combinations thereof. The functionally active hyaluronan synthase having an altered enzymatic activity has an amino acid sequence essentially as set forth in at least one of SEQ ID NOS:15-160, such as but not limited to, SEQ ID NOS:15-92, SEQ ID NOS:93-98, SEQ ID NOS:99-123, or SEQ ID NOS:124-160.

[0077] In addition, the present invention is related to a method for producing hyaluronic acid. The method includes providing a host cell having at least one expression construct comprising a hyaluronan synthase gene encoding a functionally active hyaluronan synthase incorporated therein such that the host cell is capable of producing hyaluronan, wherein the functionally active hyaluronan synthase has an altered enzymatic activity as compared to a corresponding functionally active native hyaluronan synthase. The host cell is then cultured under conditions appropriate for the production of hyaluronic acid. The method may further include separating the hyaluronic acid from the host cell. The altered enzymatic activity of the functionally active hyaluronan synthase may be an increased or decreased enzymatic activity, or the hyaluronan synthase may produce hyaluronic acid having an average molecular mass that is greater than or less than an average molecular mass of hyaluronic acid produced by a corresponding functionally active native hyaluronan synthase.

[0078] The corresponding functionally active native hyaluronan synthase may have an amino acid sequence essentially as set forth in at least one of SEQ ID NOS:2,4, 6, 8, 10, 12 and 14, while the functionally active hyaluronan synthase having an altered enzymatic activity may have an amino acid sequence essentially as set forth in at least one of SEQ ID NOS:15-160, such as but not limited to, SEQ ID NOS:15-92, SEQ ID NOS:93-98, SEQ ID NOS:99-123, or SEQ ID NOS:124-160. The functionally active hyaluronan synthase having an altered enzymatic activity may have at least one modified amino acid residue therein as compared to the corresponding functionally active native hyaluronan synthase, and the at least one modified amino acid residue may be selected from the group consisting of an asparagine, a cysteine, a glycine, a lysine, a phenylalanine, a threonine, and combinations thereof.

[0079] In another embodiment of the method of producing hyaluronic acid, the expression construct may further include at least one gene encoding an enzyme for synthesis of a hyaluronic acid sugar precursor. Optionally, the gene encoding an enzyme for synthesis of a hyaluronic acid sugar precursor may be present on a separate expression construct or may be chromosomally integrated. The enzyme for synthesis of a hyaluronic acid sugar precursor is selected from the group consisting of a pyrophosphorylase, a transferase, a mutase, a dehydrogenase, an epimerase capable of increasing production of UDP-GlcNAc or UDP-GlcUA, and combinations thereof.

[0080] In another embodiment of the method of producing hyaluronic acid, at least one biosynthetic pathway gene of a hyaluronic acid sugar precursor or at least one gene encoding an enzyme for synthesis of a hyaluronic acid sugar precursor may be provided, either in the same or different expression construct or chomosomally integrated into the host cell. In a further alternative embodiment of the method of the present invention, the hyaluronic sugar precursors may be expressed in the host cell by endogenous genes of the host cell.

[0081] In another embodiment of the method of producing hyaluronic acid, nutrients utilized for a hyaluronic acid sugar precursor biosynthetic pathway or nutrients supplying the hyaluronic acid sugar precursor biosynthetic pathway are fed or supplied to the host cell.

[0082] Unless otherwise defined herein, scientific and technical terms used in connection with the present invention shall have the meanings that are commonly understood by those of ordinary skill in the art. Further, unless otherwise required by context, singular terms shall include pluralities and plural terms shall include the singular. Generally, nomenclatures utilized in connection with, and techniques of, cell and tissue culture, molecular biology, and protein and oligo- or polynucleotide chemistry and hybridization described herein are those well known and commonly used in the art. Standard techniques are used for recombinant DNA, oligonucleotide synthesis, and tissue culture and transformation (e.g., electroporation, lipofection). Enzymatic reactions and purification techniques are performed according to manufacturer's specifications or as commonly accomplished in the art or as described herein. The foregoing techniques and procedures are generally performed according to conventional methods well known in the art and as described in various general and more specific references that are cited and discussed throughout the present specification. See e.g., Sambrook et al. Molecular Cloning: A Laboratory Manual (2nd ed., Cold Spring Harbor Laboratory Press, Cold Spring Harbor, N.Y. (1989) and Coligan et al. Current Protocols in Immunology (Current Protocols, Wiley lnterscience (1994)), which are incorporated herein by reference. The nomenclatures utilized in connection with, and the laboratory procedures and techniques of, analytical chemistry, synthetic organic chemistry, and medicinal and pharmaceutical chemistry described herein are those well known and commonly used in the art. Standard techniques are used for chemical syntheses, chemical analyses, pharmaceutical preparation, formulation, and delivery, and treatment of patients. All patents, patent applications, publications, and literature references cited in this specification are hereby incorporated herein by reference in their entirety.

[0083] As utilized in accordance with the present disclosure, the following terms, unless otherwise indicated, shall be understood to have the following meanings:

[0084] The terms “hyaluronic acid synthase”, “hyaluronate synthase”, “hyaluronan synthase” and “HA synthase”, are used interchangeably herein to describe an enzyme that polymerizes a glycosaminoglycan polysaccharide chain composed of alternating glucuronic acid and N-acetylglucosamine sugars, β1,3 and β1,4 linked. The term “seHAS”, for example, describes the HAS enzyme derived from Streptococcus equisimilis, wherein expression of the gene encoding the seHAS enzyme correlates with virulence of Streptococcal Group A and Group C strains by providing a means of escaping phagocytosis and immune surveillance.

[0085] As used herein, the term “nucleic acid segment” and “DNA segment” are used interchangeably and refer to a DNA molecule which has been isolated free of total genomic DNA of a particular species. Therefore, a “purified” DNA or nucleic acid segment as used herein, refers to a DNA segment which contains a Hyaluronate Synthase (“HAS”) coding sequence yet is isolated away from, or purified free from, unrelated genomic DNA of the source cell. Included within the term “DNA segment” are DNA segments and smaller fragments of such segments and also recombinant vectors, including, for example, plasmids, cosmids, phage, viruses, and the like.

[0086] Similarly, a DNA segment comprising an isolated or purified HAS gene refers to a DNA segment including HAS coding sequences isolated substantially away from other naturally occurring genes or protein encoding sequences. In this respect, the term “gene” is used for simplicity to refer to a functional protein, polypeptide or peptide encoding unit. As will be understood by those in the art, this functional term includes genomic sequences, cDNA sequences or combinations thereof. “Isolated substantially away from other coding sequences” means that the gene of interest, in this case HAS, forms the significant part of the coding region of the DNA segment, and that the DNA segment does not contain large portions of naturally-occurring coding DNA, such as large chromosomal fragments or other functional genes or DNA coding regions. Of course, this refers to the DNA segment as originally isolated, and does not exclude genes or coding regions later added to, or intentionally left in, the segment by the hand of man.

[0087] Due to certain advantages associated with the use of prokaryotic sources, one will likely realize the most advantages upon isolation of the HAS gene from prokaryotes. In particular, one may choose to utilize a Class I or Class II HAS, such as a Class I HAS from S. equisimilis or S. pyogenes, or a Class II HAS from P. multocida.

[0088] Streptococcus is subdivided taxonomically into Lancefield Groups based on different cell wall carbohydrate antigens. There are 18 distinct groups, but the most common pathogens are A, B, C and D. Historically, the most common pathogens are also often given specific species names, but the unified Lancefield testing method is recognized as being a clear method of typing and thus a useful classification scheme. Streptococcus species that may be utilized as the source of the HAS gene include Group A Streptococcus, such as S. pyogenes and S. haemolyticus, and Group C Streptococcus, such as S. equi, S. equisimilis, S. zooepidemicus, S. uberis and S. dysgalactiae.

[0089] One such advantage of isolating the HAS gene from prokaryotes is that, typically, eukaryotic enzymes may require significant post-translational modifications that can only be achieved in a eukaryotic host. This will tend to limit the applicability of any eukaryotic HA synthase gene that is obtained. Moreover, those of ordinary skill in the art will likely realize additional advantages in terms of time and ease of genetic manipulation where a prokaryotic enzyme gene is sought to be employed. These additional advantages include (a) the ease of isolation of a prokaryotic gene because of the relatively small size of the genome and, therefore, the reduced amount of screening of the corresponding genomic library, and (b) the ease of manipulation because the overall size of the coding region of a prokaryotic gene is significantly smaller due to the absence of introns. Furthermore, if the product of the HAS gene (i.e., the enzyme) requires posttranslational modifications, these would best be achieved in a similar prokaryotic cellular environment (host) from which the gene was derived.

[0090] In one embodiment, DNA sequences in accordance with the present invention will further include genetic control regions which allow the expression of the sequence in a selected recombinant host. Of course, the nature of the control region employed will generally vary depending on the particular use (e.g., cloning host) envisioned.

[0091] In particular embodiments, the invention cncoerns isolated DNA segments and recombinant vectors incorporating DNA sequences which encode a HAS gene, that includes within its amino acid sequence an amino acid sequence in accordance with at least one of SEQ ID NOS:2, 4, 6, 8, 10, 12 and 14-160. Moreover, in other particular embodiments, the invention concerns isolated DNA segments and recombinant vectors incorporating DNA sequences which encode a gene that includes within its amino acid sequence the amino acid sequence of a HAS gene or DNA, and in particular to a HAS gene or cDNA, corresponding to at least one of Streptococcus equisimilis HAS, Streptococcus pyogenes HAS, Streptococcus uberis HAS, Pasteurella multocida HAS, Xenopus laevis HAS, and Sulfolobus solfataricus HAS. For example, where the DNA segment or vector encodes a full length HAS protein, or is intended for use in expressing the HAS protein, sequences may be those which are essentially as set forth in at least one of SEQ ID NOS:2, 4, 6, 8, 10, 12 and 14-160.

[0092] Nucleic acid segments having HA synthase activity may be isolated by the methods described herein. The term “a sequence essentially as set forth in SEQ ID NO:X” or “a sequence as set forth in SEQ ID NO:X” means that the sequence substantially corresponds to a portion of SEQ ID NO:X and has relatively few amino acids which are not identical to, or a biologically functional equivalent of, the amino acids of SEQ ID NO:X. The term “biologically functional equivalent” is well understood in the art and is further defined in detail herein, as a gene having a sequence essentially as set forth in SEQ ID NO:X or comprising SEQ ID NO:X, and that is associated with the ability of prokaryotes or eukaryotes to produce HA or a hyaluronic acid coat.

[0093] For instance, the seHAS and spHAS coding sequences are approximately 70% identical and rich in the bases adenine (A) and thymine (T). SeHAS base content is A−26.71%, C−19.13%, G−20.81%, and T−33.33% (A/T=60%), whereas spHAS is A−31.34%, C−16.42%, G−16.34%, and T−35.8% (A/T=67%). Those of ordinary skill in the art would be surprised that the seHAS coding sequence does not hybridize with the spHAS gene and vice versa, despite their being 70% identical. This unexpected inability to cross-hybridize could be due to short interruptions of mismatched bases throughout the open reading frames. The longest stretch of identical nucleotides common to both the seHAS and the spHAS coding sequences is only 20 nucleotides. In addition, the very A-T rich sequences will form less stable hybridization complexes than G-C rich sequences. Another possible explanation could be that there are several stretches of As or Ts in both sequences that could hybridize in a misaligned and unstable manner. This would put the seHAS and spHAS gene sequences out of frame with respect to each other, thereby decreasing the probability of productive hybridization.

[0094] Because of this unique phenomena of two genes encoding proteins which are 70% identical not being capable of cross-hybridizing to one another, it is beneficial to think of the claimed nucleic acid segment in terms of its function; i.e., a nucleic acid segment which encodes enzymatically active hyaluronate synthase. One of ordinary skill in the art would appreciate that a nucleic acid segment encoding enzymatically active hyaluronate synthase may contain conserved or semi-conserved substitutions to the sequences set forth in SEQ ID NOS:2, 4, 6, 8, 10, 12 and 14-160, and yet still be within the scope of the invention.

[0095] In particular, the art is replete with examples of practitioners ability to make structural changes to a nucleic acid segment (i.e., encoding conserved or semi-conserved amino acid substitutions) and still preserve its enzymatic or functional activity. See for example: (1) Risler et al. “Amino Acid Substitutions in Structurally Related Proteins. A Pattern Recognition Approach.” J. Mol. Biol. 204:1019-1029 (1988); (2) Niefind et al. “Amino Acid Similarity Coefficients for Protein Modeling and Sequence Alignment Derived from Main-Chain Folding Anoles.” J. Mol. Biol. 219:481-497 (1991) [similarity parameters allow amino acid substitutions to be designed]; and (3) Overington et al. “Environment-Specific Amino Acid Substitution Tables: Tertiary Templates and Prediction of Protein Folds,” Protein Science 1:216-226 (1992) [“Analysis of the pattern of observed substitutions as a function of local environment shows that there are distinct patterns . . . ” Compatible changes can be made.], the contents of each being expressly incorporated herein by reference in their entirety.

[0096] These references and countless others indicate that one of ordinary skill in the art, given a nucleic acid sequence, could make substitutions and changes to the nucleic acid sequence without changing its functionality. Also, a substituted nucleic acid segment may be highly identical and retain its enzymatic activity with regard to its unadulterated parent, and yet still fail to hybridize thereto.

[0097] The invention discloses nucleic acid segments encoding enzymatically active hyaluronate synthases, such as seHAS, spHAS, suHAS, xlHAS and pmHAS. Although seHAS and spHAS are 70% identical and both encode enzymatically active hyaluronate synthase, they do not cross hybridize. Thus, one of ordinary skill in the art would appreciate that substitutions can be made to the HAS nucleic acid segments listed in SEQ ID NOS: 1, 3, 5, 7, 9, 11 and 13 without deviating outside the scope and claims of the present invention. Standardized and accepted functionally equivalent amino acid substitutions are presented in Table I.

TABLE I

| | Conservative and Semi- |
|---|---|
| Amino Acid Group | Conservative Substitutions |
| NonPolar R Groups | Alanine, Valine, Leucine, Isoleucine, |
| | Proline, Methionine, Phenylalanine, |
| | Tryptophan |
| Polar, but uncharged, R Groups | Glycine, Serine, Threonine, Cysteine, |
| | Asparagine, Glutamine |
| Negatively Charged R Groups | Aspartic Acid, Glutamic Acid |
| Positively Charged R Groups | Lysine, Arginine, Histidine |

[0098] Another embodiment of the present invention is a purified nucleic acid segment that encodes a protein in accordance with SEQ ID NOS:2, 4, 6, 8, 10, 12 and 14-160 further defined as a recombinant vector. As used herein, the term “recombinant vector” refers to a vector that has been modified to contain a nucleic acid segment that encodes an HAS protein, or fragment thereof. The recombinant vector may be further defined as an expression vector comprising a promoter operatively linked to said HAS encoding nucleic acid segment.

[0099] A further embodiment of the present invention is a host cell, made recombinant with a recombinant vector comprising an HAS gene. The recombinant host cell may be a prokaryotic cell. In another embodiment, the recombinant host cell is a eukaryotic cell. As used herein, the term “engineered” or “recombinant” cell is intended to refer to a cell into which a recombinant gene, such as a gene encoding HAS, has been introduced. Therefore, engineered cells are distinguishable from naturally occurring cells which do not contain a recombinantly introduced gene. Engineered cells are thus cells having a gene or genes introduced through the hand of man. Recombinantly introduced genes will either be in the form of a cDNA gene, a copy of a genomic gene, or will include genes positioned adjacent to a promoter not naturally associated with the particular introduced gene.

[0100] The recombinant host cell may further contain at least one gene encoding an enzyme for synthesis of a HA sugar precursor. The HA sugar precursor may be selected from a pyrophosphorylase, a transferase, a mutase, a dehydrogenase, an epimerase capable of increasing production of UDP-GlcNAc or UDP-GlcUA, and combinations thereof. The recombinant host cell may further contain a biosynthetic pathway gene of a HA sugar precursor or an enzyme for synthesis of a HA sugar precursor. These one or more genes may be present on the same expression construct as the HAS gene or on separate expression construct. Optionally, these genes may be chromosomally integrated, as described in more detail hereinbelow.

[0101] Where one desires to use a host other than Streptococcus, as may be used to produce recombinant HA synthase, it may be advantageous to employ a prokaryotic system such as E. coli, Bacillus strains, Lactococcus sp., or even eukaryotic systems such as yeast or Chinese hamster ovary, African green monkey kidney cells, VERO cells, or the like. Of course, where this is undertaken it will generally be desirable to bring the HA synthase gene under the control of sequences which are functional in the selected alternative host. The appropriate DNA control sequences, as well as their construction and use, are generally well known in the art as discussed in more detail hereinbelow. For example, in one embodiment, the host cell may be a Bacillus cell, such as a Bacillus subtilis or Bacillus licheniformis cell, and the vector introduced therein contains a Bacillus-compatible promoter to which the has gene is operably linked.

[0102] In one embodiment, the host cell is a Bacillus cell, such as Bacillus alkalophilus, Bacillus amyloliquefaciens, Bacillus brevis, Bacillus circulans, Bacillus clausii, Bacillus coagulans, Bacillus firmus, Bacillus lautus, Bacillus lentus, Bacillus licheniformis, Bacillus metaterium, Bacillus pumilus, Bacillus stearothermophilus, Bacillus subtilis and Bacillus thuringienisis.

[0103] In other embodiments, the HA synthase-encoding DNA segments further include DNA sequences, known in the art functionally as origins of replication or “replicons”, which allow replication of contiguous sequences by the particular host. Such origins allow the preparation of extrachromosomally localized and replicating chimeric segments or plasmids, to which HA synthase DNA sequences are ligated. In some instances, the employed origin is one capable of replication in bacterial hosts suitable for biotechnology applications. However, for more versatility of cloned DNA segments, it may be desirable to alternatively or even additionally employ origins recognized by other host systems whose use is contemplated (such as in a shuttle vector).

[0104] The isolation and use of other replication origins such as the SV40, polyoma or bovine papilloma virus origins, which may be employed for cloning or expression in a number of higher organisms, are well known to those of ordinary skill in the art. In certain embodiments, the invention may thus be defined in terms of a recombinant transformation vector which includes the HA synthase coding gene sequence together with an appropriate replication origin and under the control of selected control regions.

[0105] Thus, it will be appreciated by those of skill in the art that other means may be used to obtain the HAS gene or cDNA, in light of the present disclosure. For example, polymerase chain reaction or RT-PCR produced DNA fragments may be obtained which contain full complements of genes or cDNAs from a number of sources, including other strains of Streptococcus, or from eukaryotic sources, such as cDNA libraries. Virtually any molecular cloning approach may be employed for the generation of DNA fragments in accordance with the present invention. Thus, the only limitation generally on the particular method employed for DNA isolation is that the isolated nucleic acids should encode a biologically functional equivalent HA synthase.

[0106] Once the DNA has been isolated, it is ligated together with a selected vector. Virtually any cloning vector can be employed to realize advantages in accordance with the invention. Typical useful vectors include plasmids and phages for use in prokaryotic organisms and even viral vectors for use in eukaryotic organisms. Examples include pKK223-3, pSA3, recombinant lambda, SV40, polyoma, adenovirus, bovine papilloma virus and retroviruses. However, it is believed that particular advantages will ultimately be realized where vectors capable of replication in both Lactococcus or Bacillus strains and E. coli are employed.

[0107] Vectors such as these, exemplified by the pSA3 vector of Dao and Ferretti or the pAT19 vector of Trieu-Cuot, et al., allow one to perform clonal colony selection in an easily manipulatedhost such as E. coli, followed by subsequent transfer back into a food grade Lactococcus or Bacillus strain for production of HA. These are benign and well studied organisms used in the production of certain foods and biotechnology products. These are advantageous in that one can augment the Lactococcus or Bacillus strain's ability to synthesize HA through gene dosaging (i.e., providing extra copies of the HA synthase gene by amplification) and/or inclusion of additional genes to increase the availability of HA precursors. The inherent ability of a bacterium to synthesize HA can also be augmented through the formation of extra copies, or amplification, of the plasmid that carries the HA synthase gene. This amplification can account for up to a 10-fold increase in plasmid copy number and therefore the HA synthase gene copy number.

[0108] Another procedure that would further augment HA synthase gene copy number is the insertion of multiple copies of the gene into the plasmid. Another technique would include integrating the HAS gene and/or the sugar precursor gene(s) into chromosomal DNA. This extra amplification would be especially feasible, since the bacterial HA synthase gene size is small. In some scenarios, the chromosomal DNA-ligated vector is employed to transfect the host that is selected for clonal screening purposes such as E. coli, through the use of a vector that is capable of expressing the inserted DNA in the chosen host.

[0109] In another embodiment, the HA synthase gene is introduced into the host cell chromosome via homologous or heterologous recombination. The has gene may be more stable in this configuration, especially without drug selection. Various vectors may be employed to introduce the has gene into Bacillus, such as pTLH or pKSV7, or into yeast, such as Ylp2l 1, or into animal cells, such as pcDNA/FRT. The DNA is first introduced into the host cell by transformation, transduction or electroporation. The DNA segment with the has gene is then stably integrated into the host chromosome. For example, the spHAS gene was used to repair a mutant Streptococcus chromosome by transduction and integration; this operation resulted in HA production (DeAngelis et al, 1993a).

[0110] Where a eukaryotic source such as dermal or synovial fibroblasts or rooster comb cells is employed, one will desire to proceed initially by preparing a cDNA library. This is carried out first by isolation of mRNA from the above cells, followed by preparation of double stranded cDNA using an enzyme with reverse transcriptase activity and ligation with the selected vector. Numerous possibilities are available and known in the art for the preparation of the double stranded cDNA, and all such techniques are believed to be applicable. One technique involves reverse transcription. Once a population of double stranded cDNAs is obtained, a cDNA library is prepared in the selected host by accepted techniques, such as by ligation into the appropriate vector and amplification in the appropriate host. Due to the high number of clones that are obtained, and the relative ease of screening large numbers of clones by the techniques set forth herein, one may desire to employ phage expression vectors, such as λgt11, λgt12, λGem11, and/or λZAP for the cloning and expression screening of cDNA clones.

[0111] In certain other embodiments, the invention concerns isolated DNA segments and recombinant vectors that include within their sequence a nucleic acid sequence essentially as set forth at least one of in SEQ ID NOS:1, 3, 5, 7, 9, 11, 13 or a variant thereof wherein the variant encodes an amino acid sequence essentially as set forth in at least one of SEQ ID NOs:15-160. The term “essentially as set forth in SEQ ID NO: X” or “as set forth in SEQ ID NO: X”, for example, is used in the same sense as described hereinabove and means that the nucleic acid sequence substantially corresponds to a portion of SEQ ID NO: X, and has relatively few codons which are not identical, or functionally equivalent, to the codons of SEQ ID NO: X. The term “functionally equivalent codon” is used herein to refer to codons that encode the same amino acid, such as the six codons for arginine or serine, and also refers to codons that encode biologically equivalent amino acids as set forth in Table I.

[0112] It will also be understood that amino acid and nucleic acid sequences may include additional residues, such as additional N- or C-terminal amino acids or additional 5′ or 3′ nucleic acid sequences, and yet still be essentially as set forth in one of the sequences disclosed herein, so long as the sequence meets the criteria set forth above, including the maintenance of biological protein activity where protein expression and enzyme activity are concerned. The addition of terminal sequences particularly applies to nucleic acid sequences which may, for example, include various non-coding sequences flanking either of the 5′ or 3′ portions of the coding region or may include various internal sequences, which are known to occurwithin genes. In particular, the amino acid sequence of the has gene product in eukaryotes appears to be 40% larger than that found in prokaryotes, yet the prokaryotic and eukaryotic HASs display essentially identical enzymologic abilities to synthesize HA.

[0113] Allowing for the degeneracy of the genetic code as well as conserved and semi-conserved substitutions, sequences which have between about 40% and about 80%; or between about 80% and about 90%; or between about 90% and about 99%; of nucleotides which are identical to the nucleotides of SEQ ID NOS: 1, 3, 5, 7, 9, 11, 13 or a variant thereof wherein the variant encodes an amino acid sequence essentially as set forth in at least one of SEQ ID NOs:15-160 will be sequences which are “essentially as set forth in SEQ ID NO: X” or “comprising SEQ ID NO: X”. Sequences which are essentially the same as those set forth in SEQ ID NOS:1, 3, 5, 7, 9, 11, 13 or a variant thereof wherein the variant encodes an amino acid sequence essentially as set forth in at least one of SEQ ID NOS:15-160 may also be functionally defined as sequences which are capable of hybridizing to a nucleic acid segment containing the complement of SEQ ID NOS: 1, 3, 5, 7, 9, 11, 13 or a variant thereof wherein the variant encodes an amino acid sequence essentially as set forth in at least one of SEQ ID NOS:15-160 under “standard stringent hybridization conditions,” “moderately stringent hybridization conditions,” “less stringent hybridization conditions,” or “low stringency hybridization conditions.” Suitable “standard” or “less stringent” hybridization conditions will be well known to those of skill in the art and are clearly set forth hereinbelow. In one embodiment, standard stringent hybridization conditions or less stringent hybridization conditions are utilized.

[0114] The terms “standard stringent hybridization conditions,” “moderately stringent conditions,” and “less stringent hybridization conditions” or “low stringency hybridization conditions” are used herein, describe those conditions under which substantially complementary nucleic acid segments will form standard Watson-Crick base-pairing and thus “hybridize” to one another. A number of factors are known that determine the specificity of binding or hybridization, such as pH; temperature; salt concentration; the presence of agents, such as formamide and dimethyl sulfoxide; the length of the segments that are hybridizing; and the like. There are various protocols for standard hybridization experiments. Depending on the relative similarity of the target DNA and the probe or query DNA, then the hybridization is performed under stringent, moderate, or under low or less stringent conditions.

[0115] The hybridizing portion of the hybridizing nucleic acids is typically at least about 14 nucleotides in length, such as between about 14 and about 100 nucleotides in length. The hybridizing portion of the hybridizing nucleic acid is at least about 60%, e.g., at least about 80% or at least about 90%, identical to a portion or all of a nucleic acid sequence encoding a HAS or its complement, such as SEQ ID NO: 2 or 4 or the complement thereof. Hybridization of the oligonucleotide probe to a nucleic acid sample typically is performed under standard or stringent hybridization conditions. Nucleic acid duplex or hybrid stability is expressed as the melting temperature or Tₘ, which is the temperature at which a probe nucleic acid sequence dissociates from a target DNA. This melting temperature is used to define the required stringency conditions. If sequences are to be identified that are related and substantially identical to the probe, rather than identical, then it is useful to first establish the lowest temperature at which only homologous hybridization occurs with a particular concentration of salt (e.g., SSC, SSPE, or HPB). Then, assuming that 1% mismatching results in a 1 C decrease in the Tₘ, the temperature of the final wash in the hybridization reaction is reduced accordingly (for example, if sequences having >95% identity with the probe are sought, the final wash temperature is decreased by about 5 C.). In practice, the change in Tₘ can be between about 0.5° C. and about 1.5° C. per 1% mismatch. Examples of standard stringent hybridization conditions include hybridizing at about 68° C. in 5×SSC/5×Denhardt's solution/1.0% SDS, followed with washing in 0.2×SSC/0.1% SDS at room temperature or hybridizing in 1.8×HPB at about 30° C. to about 45° C. followed by washing a 0.2-0.5×HPB at about 45° C. Moderately stringent conditions include hybridizing as described above in 5×SSC\5×Denhardt's solution 1% SDS washing in 3×SSC at 42° C. The parameters of salt concentration and temperature can be varied to achieve the optimal level of identity between the probe and the target nucleic acid. Additional guidance regarding such conditions is readily available in the art, for example, by Sambrook et al., 1989, Molecular Cloning, A Laboratory Manual, (Cold Spring Harbor Press, N.Y.); and Ausubel et al. (eds.), 1995, Current Protocols in Molecular Biology, (John Wiley & Sons, N.Y.). Several examples of low stringency protocols include: (A) hybridizing in 5×SSC, 5×Denhardts reagent, 30% formamide at about 30° C. for about 20 hours followed by washing twice in 2×SSC,0.1% SDS at about 30° C. for about 15 min followed by 0.5×SSC, 0.1% SDS at about 30° C. for about 30 min (FEMS Microbiology Letters, 2000, vol.193, p. 99-103); (B) hybridizing in 5×SSC at about 45° C. ovemight followed by washing with 2×SSC, then by 0.7×SSC at about 55° C. (J. Biological Methods, 1990, vol. 30, p. 141-150); or (C) hybridizing in 1.8×HPB at about 30° C. to about 45° C.; followed by washing in 1×HPB at 23° C.

[0116] Naturally, the present invention also encompasses DNA segments which are complementary, or essentially complementary, to the sequence set forth in SEQ ID NOS:1, 3, 5, 7, 9, 11, 13 or a variant thereof wherein the variant encodes an amino acid sequence essentially as set forth in at least one of SEQ ID NOS:15-160. Nucleic acid sequences which are “complementary” are those which are capable of base-pairing according to the standard Watson-Crick complementarity rules. As used herein, the term “complementary sequences” means nucleic acid sequences which are substantially complementary, as may be assessed by the same nucleotide comparison set forth above, or as defined as being capable of hybridizing to the nucleic acid segment of SEQ ID NOS: 1, 3, 5, 7, 9, 11, 13 or a variant thereof wherein the variant encodes an amino acid sequence essentially as set forth in at least one of SEQ ID NOS:15-160.

[0117] The nucleic acid segments of the present invention, regardless of the length of the coding sequence itself, may be combined with other DNA sequences, such as promoters, polyadenylation signals, additional restriction enzyme sites, multiple cloning sites, epitope tags, poly histidine regions, other coding segments, and the like, such that their overall length may vary considerably. It is therefore contemplated that a nucleic acid fragment of almost any length may be employed, with the total length possibly being limited by the ease of preparation and use in the intended recombinant DNA protocol.

[0118] Naturally, it will also be understood that this invention is not limited to the particular nucleic acid and amino acid sequences of SEQ ID NOS:1, 3, 5, 7, 9, 11 or 13 (or a variant thereof wherein the variant encodes an amino acid sequence essentially as set forth in at least one of SEQ ID NOS:15-160) and SEQ ID NOS: 15-160, respectively. Recombinant vectors and isolated DNA segments may therefore variously include the HAS coding regions themselves, coding regions bearing selected alterations or modifications in the basic coding region, or they may encode larger polypeptides which nevertheless include HAS-coding regions or may encode biologically functional equivalent proteins or peptides which have variant amino acids sequences.

[0119] The terms “SEC-MALLS” and “GPC-MALLS” are used herein interchangeably and will be understood to refer to size partitioning chromatography. “SEC-MALLS” refers to size exclusion chromatography, while “GPC-MALLS” refers to gel permeation or gel filtration chromatography.

[0120] Sulfhydryl reagents inhibit the activity of seHAS and spHAS. SeHAS is the smallest HAS protein (417 amino acids) and contains four Cys residues. The four cysteines of seHAS are completely conserved among the three prokaryotic HASs (excluding pmHAS) and are conserved positionally among all the vertebrate HASs (FIG. 1). To explore the possible role of cysteines in the function of HAS, the activities of seHAS and spHAS were assayed in the presence of different sulfhydryl reagents (Table II). Almost identical sensitivities were observed for the two enzymes. For example, seHAS activity was inhibited >93% by methylmethanethiosulfonate (0.05 mM) and ˜70% by NEM (5 mM), whereas IAA inhibited only 15%. Sodium arsenite and 5,5′-dithiobis-(2-nitrobenzoic acid) also inhibited each HAS activity. These results indicate that one or more Cys residues are important for the overall HA synthesis activity of the seHAS and spHAS proteins. The inhibition of each HAS by NEM was examined in more detail with respect to time of incubation and NEM concentration (FIG. 2). Both seHAS and spHAS were inhibited in a biphasic manner, with respect to incubation time or NEM concentration. Although the extent of inhibition varied from experiment to experiment, a 60-70% effect was typical. About half of the observed inactivation occurred at ≦1 mM NEM, whereas the remaining inactivation occurred from 1-6 mM (FIG. 2A). Kinetically, there was a fast initial inactivation and then a much slower phase of inhibition; again each of the phases involved about half of the affected activity (FIG. 2B).

[0121] A potential complication in the above NEM studies is that the effects of a sulfhydryl modifying reagent may be due to secondary effects caused by modification of other molecules in the membranes being tested. Although this possibility is highly unlikely, since seHAS is the only protein necessary for HA biosynthesis, the effect of sulfhydryl reagents on the seHAS Cys-null mutant in isolated membranes was also examined under the conditions shown in FIG. 3.

[0122] The activity of seHAS^{Cys-null} was not affected (≦1%) by treatment with NEM, IAA or sodium arsenite, which eliminates the possibility that modified secondary proteins in the membranes preparations were responsible for the altered HAS activity.

TABLE II
Effect of different sulfhydryl reagents on seHAS or spHAS activity.
E. coli membranes expressing the recombinant seHAS-H₆ or spHAS-H₆
proteins were incubated at 4° C. for 1 h with PBS containing either
5 mM NEM, 5 mM IAA, 0.5 mM 5, 5′-dithiobis-(2-nitrobenzoic acid),
0.05 mM methylmethanethiosulfonate, 10 mM sodium arsenite or no
addition (control, which was set as 100%). The remaining seHAS
activity was then determined in quadruplicate and expressed as
% relative to the control. The mean values and standard deviations
are shown.

Inhibition of
HAS Activity
(% relative to control)

| Sulfhydryl Reagent | seHAS | spHAS |
|---|---|---|
| N-ethylmaleimide | 70 ± 4.8 | 60 ± 3.5 |
| Iodoacetic acid | 15 ± 6.0 | 13 ± 5.4 |
| 5, 5′-dithiobis-(2-nitrobenzoic acid) | 52 ± 6.5 | 52 ± 4.9 |
| Methylmethanethiosulfonate | 93 ± 5.4 | 89 ± 5.5 |
| Sodium Arsenite | 40 ± 4.0 | 46 ± 5.1 |

[0123] TABLE III
Effect of NEM or sodium arsenite treatment on the utilization
of UDP-GlcUA and UDP-GlcNAc by wild-type seHAS
E. coli membranes containing seHAS protein were incubated
at 4° C. for 1 h with PBS alone (control) or PBS containing
5 mM NEM or 10 mM sodium arsenite. The activity of seHAS was
determined in triplicate with varying concentrations of UDP-GlcUA or
UDP-GlcNAc as described in Materials and Methods, and the
Michaelis-Menten Constants (Kₘ and Vₘₐₓ) ± standard
errors were calculated.

| | UDP-GlcUA | | | UDP-GlcNAc | | |
|---|---|---|---|---|---|---|
| | | | Sodium | | | Sodium |
| | Control | NEM | Arsenite | Control | NEM | Arsenite |
| Kₘ | 85 ± 10 | 57 ± 5 | 67 ± 23 | 122 ± 30 | 82 ± 17 | 112 ± 38 |
| (μM) | | | | | | |
| Vₘₐₓ | 14.9 ± 3.6 | 7.3 ± 2.2 | 9.5 ± 1.1 | 14.9 ± 3.6 | 7.3 ± 2.2 | 9.5 ± 1.1 |
| (nmol/μg/h) | | | | | | |

[0124] Modification of the protein by NEM could affect any one or several of the six discrete functions that HAS must perform in order to synthesize HA. In order to determine if one of the nucleotide-sugar binding sites was affected by NEM, we examined the UDP-GlcUA and UDP-GlcNAc saturation profiles for treated and untreated seHAS (FIG. 3 and Table ll). The Kₘ values for either UDP-GlcNAc (FIG. 3A) or UDP-GlcUA (FIG. 3B) were not altered significantly by treatment with NEM or sodium arsenite, whereas the maximum enzymatic velocity was reduced by up to ˜70%.

[0125] Effect of site-specific Cys mutagenesis on the HA synthase activity of seHAS. Site-specific Cys-to-Ala and Cys-to-Ser mutants of seHAS were made in order to explore the possible functional role of each Cys residue in HAS activity (see Table IV for a list of the seHAS Cys mutants). In all of the following kinetic studies using the wild-type (or native) and mutant seHAS proteins, the data obtained were normalized to the amount of intact seHAS protein as described herein. The single Cys-to-Ala or Cys-to-Ser mutants of seHAS had lower enzyme activities compared to the wild-type enzyme, except for the C367A and C367S variants (FIG. 4 and Table V). This result indicates that CyS²²⁶, CyS²⁶² and CyS²⁸¹ contribute to the catalytic activity of seHAS. The K^{m} values for UDP-GlcUA of the C226A and C262A mutants were higher when compared to the corresponding values for the C226S and C262S variants. However, the Kₘ values for UDP-GlcNAc were not quite as clear-cut. The K_{UDP-GlcNAc} value for the C226S mutant was higher than that of the C226A mutant, whereas the C262A and C281A mutant proteins both had higher K_{UDP-GlcNAc} values compared to the C262S and C281S variants. At the C367 position, similar Kₘ values for each nucleotide-sugar were obtained for both the Ala and Ser mutants.

TABLE IV
All Possible Cysteine Mutants of seHAS and spHAS.
Each of the Cysteines listed may be mutated to Alanine,
Serine, or any other amino acid as described herein previously.
In addition, when more than one Cysteine is mutated, all the
mutations may be the same (i.e., all Cys-Ala mutations), or a
mutant containing multiple Cysteine mutations may have a
combination of Cys-Ala, Cys-Ser and Cys-Xaa mutations.

| HAS | Cysteine(s) mutated | SEQ ID NO: |
|---|---|---|
| seHAS | 226 | 15 |
| seHAS | 262 | 16 |
| seHAS | 281 | 17 |
| seHAS | 367 | 18 |
| seHAS | 226, 262 | 19 |
| seHAS | 226, 281 | 20 |
| seHAS | 226, 367 | 21 |
| seHAS | 262, 281 | 22 |
| seHAS | 262, 367 | 23 |
| seHAS | 281, 367 | 24 |
| seHAS | 262, 281, 367 | 25 |
| seHAS | 226, 281, 367 | 26 |
| seHAS | 226, 262, 367 | 27 |
| seHAS | 226, 262, 281 | 28 |
| seHAS | Cys-null (226, 262, 281, 367) | 29 |
| spHAS | 124 | 30 |
| spHAS | 225 | 31 |
| spHAS | 261 | 32 |
| spHAS | 280 | 33 |
| spHAS | 366 | 34 |
| spHAS | 402 | 35 |
| spHAS | 125, 225 | 36 |
| spHAS | 124, 261 | 37 |
| spHAS | 124, 280 | 38 |
| spHAS | 124, 366 | 39 |
| spHAS | 124, 402 | 40 |
| spHAS | 225, 261 | 41 |
| spHAS | 225, 280 | 42 |
| spHAS | 225, 366 | 43 |
| spHAS | 225, 402 | 44 |
| spHAS | 261, 280 | 45 |
| spHAS | 261, 366 | 46 |
| spHAS | 261, 402 | 47 |
| spHAS | 280, 366 | 48 |
| spHAS | 280, 402 | 49 |
| spHAS | 366, 402 | 50 |
| spHAS | 124, 225, 261 | 51 |
| spHAS | 124, 225, 280 | 52 |
| spHAS | 124, 225, 366 | 53 |
| spHAS | 124, 225, 402 | 54 |
| spHAS | 124, 261, 280 | 55 |
| spHAS | 124, 261, 366 | 56 |
| spHAS | 124, 261, 402 | 57 |
| spHAS | 124, 280, 366 | 58 |
| spHAS | 124, 280, 402 | 59 |
| spHAS | 124, 366, 402 | 60 |
| spHAS | 225, 261, 280 | 61 |
| spHAS | 225, 261, 366 | 62 |
| spHAS | 225, 261, 402 | 63 |
| spHAS | 225, 280, 366 | 64 |
| spHAS | 225, 280, 402 | 65 |
| spHAS | 225, 366, 402 | 66 |
| spHAS | 261, 280, 366 | 67 |
| spHAS | 261, 280, 402 | 68 |
| spHAS | 261, 366, 402 | 69 |
| spHAS | 280, 366, 402 | 70 |
| spHAS | 124, 225, 261, 280 | 71 |
| spHAS | 124, 225, 261, 366 | 72 |
| spHAS | 124, 225, 261, 402 | 73 |
| spHAS | 124, 225, 280, 366 | 74 |
| spHAS | 124, 225, 280, 402 | 75 |
| spHAS | 124, 225, 366, 402 | 76 |
| spHAS | 124, 261, 280, 366 | 77 |
| spHAS | 124, 261, 280, 402 | 78 |
| spHAS | 124, 261, 366, 402 | 79 |
| spHAS | 124, 280, 366, 402 | 80 |
| spHAS | 225, 261, 280, 366 | 81 |
| spHAS | 225, 261, 280, 402 | 82 |
| spHAS | 225, 261, 366, 402 | 83 |
| spHAS | 225, 280, 366, 402 | 84 |
| spHAS | 261, 280, 366, 402 | 85 |
| spHAS | 124, 225, 261, 280, 366 | 86 |
| spHAS | 124, 225, 261, 280, 402 | 87 |
| spHAS | 124, 225, 261, 366, 402 | 88 |
| spHAS | 124, 225, 280, 366, 402 | 89 |
| spHAS | 124, 261, 280, 366, 402 | 90 |
| spHAS | 225, 261, 280, 366, 402 | 91 |
| spHAS | Cys-null (124, 225, 261, 280, 366, | 92 |
| | 402) | |

[0126] From these results it is shown that functional constraints are put on the HAS enzyme by particular alterations of at least one of its Cys residues. Since the C226A and C226S mutants were the least active, Cys²²⁶ appears to be the most important Cys residue for enzyme activity. The seHAS(C367A) variant was actually more active than wild-type (˜145%) and the seHAS(C367S) variant was not significantly altered. In each of the four cases, the Cys-to-Ala change resulted in a variant with greater activity than the Cys-to-Ser change. The least tolerated single Cys change was C226S; this mutant was inhibited >90%.

[0127] All the possible Cys-to-Ala double mutants (C226,262A; C226,281A; C226,367A; C262,281A; C262,367A; C281,367A) as well as the triple mutants and the Cys-null mutant were constructed and examined. For simplicity, the triple Cys-mutants are designated by a convention that indicates which of the four Cys residues remains unaltered. For example, the triple mutant containing C(226,281,367)A changes is seHAS(A3C)C²⁶², which has only one Cys at position 262 as in the wild-type protein. The HA synthase activities of these multiple-Cys seHAS mutants were then determined under saturating conditions for each substrate and normalized to the amount of seHAS protein present in the isolated membranes (FIG. 5). The least active double mutant was C(226,262)A, which had only 2-3% of the specific activity of the wild-type enzyme. All three double mutants, in which Cys²²⁶ was changed to Ala, had lower activity compared to the other three double mutants. Two of the triple mutants, seHAS(Δ3C)C²²⁶ and seHAS(A3C)C²⁶² were significantly more active (˜3-30 fold) than the other two triple mutants seHAS(A3C)C²⁸¹ and seHAS(A3C)C²⁸⁷.

[0128] Surprisingly, the Cys-null seHAS mutant was more active than the two least active triple Cys-mutants and two of the six double Cys-mutants (FIG. 5). The decreased activities of the single and multiple Cys-mutants are consistent with the inhibition of seHAS or spHAS by sulfhydryl reagents described above. Based on the lower specific activities of most of these Cys-mutants, it was concluded that no particular cysteine residue in seHAS is required for a critical step during HA synthesis. Nonetheless, these data also support the conclusion that Cys²²⁶ and Cys²⁶² may play a role, or at least influence, one or more of the six sub-activities required for the overall activity of HAS. At least the alteration or modification of these latter two residues hinders the enzyme and results in apparently lower Vₘₐₓ values.

TABLE V
Michaelis-Menton Constants for single Cys-Mutants of seHAS
Kinetic analyses were performed as described herein using
membranes prepared from E. coli SURE cells expressing
the indicated seHAS variants. Hill numbers for the wild-type seHAS
and single Cys-mutants of seHAS ranged from 0.9 to 1.2 and none
of the mutant values were significantly different from wild-type

| | | Km | |
|---|---|---|---|
| seHAS | Vmax | for UDPGIcUA | Km for UDPGIcNAc |
| MUTANTS | (nmol/pmol/h)^{a} | (μM) | (μM) |
| WT | 5.60 ± 0.48 | 77 ± 5 | 74 ± 7 |
| C226A | 1.34 ± 0.21 | 88 ± 17 | 154 ± 23^{b} |
| C226S | 0.45 ± 0.08^{c} | 44 ± 7^{b} | 232 ± 0.2^{c} |
| C262A | 3.36 ± 0.26 | 146 ± 41 | 186 ± 26^{b} |
| C262S | 1.56 ± 0.05 | 96 ± 10 | 153 ± 0.5^{c} |
| C281A | 3.36 ± 0.37 | 40 ± 9^{b} | 130 ± 12^{b} |
| C281S | 2.29 ± 0.40 | 56 ± 0.6^{b} | 98 ± 11 |
| C367A | 8.17 ± 0.32 | 85 ± 12 | 90 ± 10 |
| C367S | 5.37 ± 0.21 | 79 ± 10 | 91 ± 1 |

^{a}All values were significantly different than wild-type (p ≦ 0.05) except for C367S.
^{b}Significantly different from wild-type (p ≦ 0.05)
^{c}Significantly different from wild-type (p ≦ 0.005)

[0129] TABLE VI
Michaelis-Menton Constants for double Cys-Mutants of seHAS
Kinetic analyses were performed as described herein using
membranes prepared from E. coli SURE cells expressing
the indicated seHAS variants.

| | | Km for | Km for | |
|---|---|---|---|---|
| seHAS | Vmax | UDPGIcUA | UDPGIcNAc | Hill |
| MUTANT | (nmol/pmol/h)^{a} | (μM) | (μM) | number |
| WT | 5.60 ± 0.48 | 77 ± 5 | 74 ± 7 | 1.1 ± 0.1 |
| (C226, 262A) | 0.18 ± 0.01^{c} | 134 ± 27^{b} | 650 ± 66^{c} | 1.8 ± 0.2^{c} |
| (C226, 281A) | 1.51 ± 0.42 | 53 ± 5 | 108 ± 4^{b} | 1.0 ± 0.1 |
| (C226, 367A) | 0.84 ± 0.03^{c} | 79 ± 19 | 149 ± 13^{b} | 1.1 ± 0.1 |
| (C262, 281A) | 2.52 ± 0.19 | 113 ± 40 | 298 ± 39^{c} | 1.5 ± 0.1^{c} |
| (C262, 367A) | 4.20 ± 0.44 | 121 ± 3^{b} | 172 ± 3^{c} | 1.4 ± 0.2^{b} |
| (C281, 367A) | 3.69 ± 0.42 | 65 ± 24 | 131 ± 1^{b} | 1.2 ± 0.2 |

^{a}All values were significantly different than wild-type (p ≦ 0.05)
^{b}Significantly different from wild-type (p ≦ 0.05)
^{c}Significantly different from wild-type (p ≦ 0.005)

[0130] TABLE VII
Michaelis-Menton Constants for triple and quadruple Cys-Mutants
of seHAS Kinetic analyses were performed as described herein
using membranes prepared from E. coli SURE cells expressing
the indicated seHAS variants.

| | | Km | Km for | |
|---|---|---|---|---|
| | Vmax | for UDPGIcUA | UDPGIcNAc | Hill |
| MUTANTS | (nmol/pmol/h)^{a} | (μM) | (μM) | number |
| WT | 5.60 ± 0.48 | 77 ± 5 | 74 ± 7 | 1.1 ± 0.1 |
| (Δ3C)C²²⁶ | 2.57 ± 0.22 | 81 ± 11 | 273 ± 21^{c} | 1.7 ± 0.3^{b} |
| (Δ3C)C²⁶² | 2.63 ± 0.06 | 87 ± 15 | 189 ± 34^{b} | 1.5 ± 0.2^{b} |
| (Δ3C)C²⁸¹ | 0.08 ± 0.02 | 109 ± 7^{b} | 453 ± 137^{b} | 1.9 ± 0.4^{c} |
| (Δ3C)C³⁶⁷ | 0.78 ± 0.02 | 120 ± 12^{b} | 444 ± 46^{c} | 1.8 ± 0.5^{b} |
| Cys null | 0.95 ± 0.05 | 210 ± 46^{b} | 447 ± 31^{c} | 1.6 ± 0.1^{c} |

^{a}All values were significantly different than wild-type (p ≦ 0.05)
^{b}Significantly different from wild-type (p ≦ 0.05)
^{c}All values were significantly different from wild-type (p ≦ 0.005)

[0131] Enzymatic Analysis of seHAS Cys-mutants. To determine which sub-activities of seHAS might be altered by mutating its Cys residues, kinetic analyses of the wild-type enzyme and all the Cys-mutants were performed and their respective Kₘ and Vₘₐₓ values calculated (Tables V-VII). A comparison of the Vₘₐₓ values for each of the single, double, and triple Cys-to-Ala mutants of seHAS verified that the least active mutants were C(226,262)A and seHAS(Δ3C)C²⁸¹, with only ˜1-3% of the wild-type activity (as suggested by the results in FIG. 5). The seHAS(C226S) mutant had ˜10% of the wild-type activity (Table V). The C226A, C(226,367)A, seHAS(Δ3C)C³⁶⁷ and Cys-null mutants had activities between 17-30% of wild-type. The remaining eight seHAS Cys-mutants retained 40% or more of the activity of wild-type seHAS. The only mutant (Table V) that had a higher activity than wild-type was seHAS(C367A).

[0132] The Kₘ values for UDP-GlcUA for all the Cys-mutants (Tables V-VII) differed by no more than 2-3 fold from wild-type seHAS. For most of the Cys-mutants, the Kₘ values for UDP-GlcNAc also did not change dramatically (within 1-3 fold). These relatively modest changes indicate that the altered Cys residues in these seHAS variants play a relatively minor role in how the enzyme binds and uses each nucleotide-sugar. However, some combinations of Cys-mutations had more dramatic effects on nucleotide-sugar utilization. For example, the K_{UDP-GlcNAc} value for seHAS(Δ3C)²²⁶ was ˜4-fold higher (Table VII). The K_{UDP-NAc} values for the C(226,262)A mutant (Table VI) and the seHAS(Δ3C)C²⁸¹, seHAS(Δ3C)C³⁶⁷ and Cys-null mutants (Table VII) were even more affected; they were ˜6-9 fold more than wild-type. These latter mutants were clearly less efficient in their utilization of UDP-GlcNAc than the wild-type seHAS. Interestingly, these mutants also had Hill numbers >1.5, compared to a value of 1.0 for the wild-type enzyme, indicating that they had acquired a new level of cooperativity in their utilization of UDP-GlcNAc. All of the above kinetic results indicate a potentially important, though not absolutely essential, role for Cys²²⁶ and Cys²⁶² in seHAS activity.

[0133] Cysteine residues are not essential for HAS activity but are in or near substrate binding sites. Although the 4 Cys residues in seHAS (positions 226, 262, 281 and 367) are roughly conserved in all Class I HAS family members, the Cys-null mutants of seHAs and spHAS are active, with minimal changes in their kinetics compared to wild type. It is also shown here that neither HAS contains disulfide bonds. To understand why these four cysteines are, nevertheless, largely conserved within the Class I HASs, NEM sensitivity was examined (i.e., the time- and dose-dependent inhibition) of all possible Cys-to-Ala mutants of seHAS. Chemical modification studies of seHAS showed that Cys226, Cys262 and Cys281 react with NEM, whereas Cys367 is not accessible. Substrate protection studies comparing the wild-type and Cys-mutants indicated that NEM-reactive Cys226 and Cys262 are located in or near a substrate binding site(s), because the presence of UDP-GlcUA or UDP-GlcNAc prevented inactivation by NEM. Cys281 appears not to be within a UDP-sugar binding site, since the triple Cys-mutant seHAS (Δ3C)C281 was not protected from NEM inhibition by UDP, UDP-GlcUA or UDP-GlcNAc (FIG. 6). Since sodium arsenite, which can crosslink two close Cys residues, similarly inhibited the double Cys-mutant seHAS C(226,367)A and wild type-seHAS, it is believed that Cys281 and Cys262 are very close (essentially vicinal) in the protein.

[0134] Relative size distributions of HA synthesized by various Cys-mutants of seHAS. HASs from different species synthesize HA products with a characteristic, and often different, distribution of sizes. To determine whether any of the Cys-mutants of seHAS synthesize HA having an altered size distribution, compared to wild-type seHAS, agarose gel electrophoresis was used to fractionate the radiolabelled HA products made by each variant enzyme (FIG. 7). The majority of the single (FIG. 7A) and double Cys-mutants (FIG. 7B) synthesized HA of essentially identical size compared to the wild-type enzyme. The C281A and C367S single mutants and the C(262,281)A and C(281,367)A double mutants made smaller products. Three of the four triple mutants (all except seHAS(Δ3C)C²⁸¹) and the Cys-null mutant made smaller HA products (FIG. 6B). The smallest relative HA size distribution was made by the triple mutant seHAS(Δ3C)C²²⁶. Interestingly, the HA size distributions of the seHAS mutants C(226)S, C(226,262)A and (Δ3C)C²⁸¹ were similar to that of the wild-type enzyme, even though these mutants had the lowest activity (1.4-8% of wild-type), and therefore the lowest HA elongation rates. Overall, these results clearly show that mutations of various combinations of Cys residues cause seHAS to synthesize shorter HA chains than the wild-type enzyme, indicating that Cys residues can influence the HA size distribution made by seHAS.

[0135] Assessment ofdisulfide bond formation in seHAS. In order to understand the potential role of Cys residues in the function of seHAS, it is necessary to determine if any of its four cysteines are involved in the formation of disulfide bonds. Two approaches were undertaken to answer this question. In the first approach, E. coli membranes containing recombinant seHAS were treated with ¹⁴C-NEM to determine whether the wild-type or Cys-mutant seHAS proteins could be radio-labeled and then identified by autoradiography following SDS-PAGE (FIG. 8). This NEM-reactivity was used to indicate the presence of free cysteines, which are not involved in disulfide bond formation. Each of the six Cys-to-Ala double Cys-mutants of seHAS was radiolabeled by ¹⁴C-NEM. The labeling was specific because the vector-alone control and the Cys-null mutant did not show significant labeling. These results indicate that none of the Cys residues in seHAS are involved in disulfide bonds. A 31 kDa band, which was present in the mixture of NEM-labeled proteins from the wild-type and several double-Cys mutants, could be a degradation product of HAS, since it was not present in the vector-alone controls. Such a fragment is expected to be inactive and illustrates the importance of normalizing the kinetic data to the amount of intact HAS protein, as assessed by protein staining of SDS-PAGE gels.

[0136] In the second approach to assess the presence of disulfide bonds, the purified enzyme was treated with biotin-PEO-maleimide, and the modified protein products were then analyzed by MALDI-TOF mass spectrometry (FIG. 9). For each biotin-PEO-maleimidyl group added, the mass of the seHAS derivative increased 525.6 Da. The treated wild-type seHAS contained a distribution of derivatized products with increased masses equal to the addition of one-to-four biotin-PEO-maleimide groups per seHAS (FIG. 9A). Most of the proteins were modified by the addition of 3 or 4 groups, demonstrating that the enzyme has no disulfide bonds. The observed mass values for the three largest adducts differed from the predicted values by <0.005%. The degree of modification was only slightly higher when the wild-type seHAS was treated with biotin-PEO-maleimide in the presence of 6 M guanidinium hydrochloride (not shown). This latter result indicates that none of the four Cys residues is substantially buried in the native enzyme; they are all accessible to react with the relatively large modifying reagent. The seHAS^{Cys-null} protein was also treated with biotin-PEO-maleimide, as a control, to verify that no derivitized enzyme products could be formed in the absence of Cys groups (FIG. 9B). The result confirms that the modifying reagent does not react with any other amino acid side chains and is specific for Cys; no covalent adducts were formed with the Cys-null protein.

[0137] Mutagenesis of Cys residues and expression of spHAS. To explore the possible presence of disulfide bonds and the functional roles of the conserved Cys residues in the enzymatic activity of the S. pyogenes HAS, each of the six Cys residues in spHAS was mutated to Ser or Ala (see Table IV for a list of the Cys mutants). Subsequently, spHAS mutants with combinations of Cys-to-Ala changes were produced by using site directed mutagenesis or restriction enzyme digestion and ligation of HAS fragments from different mutants. Studies with crude membranes, in which the enzyme activity of spHAS mutants were initially normalized to total membrane protein, indicated that alteration of some Cys residues had a dramatic affect on HA production. For example, spHAS(C225A) appeared to be nearly inactive, and spHAS(C261A) and spHAS(C280A) had less than half the activity of wildtype. However, these initial impressions were incorrect due to significant variations in the expression of spHAS protein among the various mutants.

[0138] Therefore, in order to normalize for the level of HAS protein expression, a sensitive and quantitative Western blot-based assay was developed (Heldermon, et al. 2001). Since all of the HAS constructs contain a C-terminal His₆ tag, which is efficiently recognized by a commercial anti-His₅ monoclonal antibody, this antibody was used, after biotinylation, as the primary antibody for analysis of Western blots followed by incubation with ¹²⁵I-streptavidin as the secondary reagent. Unlike standard Western analysis, this detection protocol provides greater sensitivity as well as the ability to quantitate HAS protein over a much broader concentration range. The normalizations for HAS protein expression were performed relative to known amounts of purified spHAS-His₆ included in each analysis as internal standards. Based on the normalized results, it was clear that spHAS(C225S) was expressed at the lowest level relative to any of the other mutants, ˜66% of wildtype (Table VIII). The protein expression levels for the majority of single Cys-mutants were not significantly different than wildtype, although the spHAS(C1 24S) and spHAS(C261 A) variants may have been elevated by ˜35% (p˜0.05). Interestingly, most of the multiple Cys-mutants as well as the Cys-null mutant were expressed at 3-to-5 fold higher levels than the wildtype enzyme. These above differences in relative expression of these spHAS variants were consistent in multiple experiments, with independent cell growth and enzyme induction, indicating that several of the Cys residues in spHAS, particularly the conserved Cys at position 225, may influence the initial folding and stability of the enzyme.

[0139] Enzymatic Analysis of Mutants. Kinetic analyses of the single and multiple spHAS Cys-mutants were performed to investigate the possibility that multiple Cys residues are critical in a coordinated way for enzyme activity. The activity of each of the mutants was assayed and normalized by the above method to determine its maximum velocity (Vₘₐₓ) and Michaelis-Menton (Kₘ) constants for UDP-GlcUA and UDP-GlcNAc (FIGS. 10 and 11; Table IX). This analysis revealed no dependence of HAS activity on any single Cys residue. These assays also revealed no extreme changes in maximal enzyme activity relative to wildtype spHAS. The spHAS(C225S) and spHAS(C280A) mutants had the most reduced activities with Vₘₐₓ values at 30-50% of wildtype. The spHAS(C261,280A) and Cys-null mutant had 50-75% of the wildtype activity. Interestingly, spHAS(C124,366,402A) and spHAS(C366A) had an increased activity that was ˜150% of wildtype. The other single mutants, as well as spHAS(C124,402A), and spHAS(C124,261,280,366,402A) demonstrated less than a 25% variation from the wildtype Vₘₐₓ.

[0140] All the mutant spHASs were also within 25% of the wildtype enzyme for their K_{UDP-GlcNAc} values. There were no changes in the sigmoidal behavior for UDP-GlcNAc utilization by any of the mutant enzymes. When these data were analyzed using the method of Hill (1913), the Hill numbers were all ˜2 (Table IX), which indicates a high degree of cooperativity associated with the ability of all the mutant enzymes to bind and use UDP-GlcNAc at a fixed UDP-GlcUA concentration. Thus, the cooperativity observed for the utilization of UDP-GlcNAc by the spHAS enzyme (Tlapak-Simmons et al., 1999b) is not influenced by, or dependent on, any of its six Cys residues. Similarly, none of these Cys residues contribute structurally, or otherwise, to a possible secondary binding site for UDP-GlcNAc, i.e., an allosteric binding site.

[0141] The K_{UDP-GlcUA} values for all of the single Cys-mutants and the two double Cys-to-Ala mutants were within 50% of wildtype. The remaining multiple Cys- to-Ala mutants exhibited K_{UDP-GlcUA} values that were 2-3 times that of wildtype. Although these multiple Cys-mutations do alter the activity of the enzyme by decreasing the efficiency of utilizing UDP-GlcUA, they do not do so in a large way. Furthermore, the relatively modest difference in activity between the Cys-null mutant and wildtype spHAS clearly shows that cysteine residues are not absolutely necessary for HA synthesis, either catalytically or structurally.

[0142] Inhibition of spHAS activity by NEM. NEM treatment of membranes from a panel of multiple Cys-mutants showed that this inhibition was no longer present in spHAS^{Cys-null} or the mutant with only Cys²²⁵ intact, whereas NEM sensitivity remained in the other multiple Cys-mutants (FIG. 12). These results indicate that the inhibition of the wildtype enzyme by NEM or other sulfhydryl/reactive agents is most likely due to modification of the Cys residues alone, rather than the loss of the S-H group. The lack of inhibition of the single Cys-containing mutant demonstrates that Cys²²⁵ is either predominantly inaccessible to modification by NEM due to its position in the enzyme or that this particular cysteine residue is not involved in the inhibition response of the enzyme when modified by NEM.

TABLE VIII
Expression levels of various Cys-mutants of spHAS.
Membranes prepared from E. coli SURE cells expressing
the indicated spHAS variants were fractionated by SDS-PAGE
and the proteins were transferred to nitrocellulose. SpHAS protein
levels were quantitated as described in Methods and the values
were normalized to that of the wildtype. Student t-tests were
performed to assess the significance of differences compared to the
expression of the wildtype enzyme.

| | Relative | Standard | | t-test (p |
|---|---|---|---|---|
| spHAS Construct | Concentration | Deviation | n | value) |
| Wildtype | 1.00 | 0.18 | 8 | — |
| C124A | 1.01 | 0.12 | 4 | 0.89 |
| C124S | 1.35 | 0.39 | 4 | 0.06 |
| C225A | 1.24 | 0.52 | 4 | 0.24 |
| C225S | 0.66 | 0.22 | 4 | 0.02 |
| C261A | 1.35 | 0.10 | 3 | 0.01 |
| C261S | 1.16 | 0.14 | 4 | 0.16 |
| C280A | 1.04 | 0.25 | 4 | 0.73 |
| C280S | 1.30 | 0.42 | 4 | 0.10 |
| C366A | 0.97 | 0.30 | 4 | 0.84 |
| C366S | 1.11 | 0.24 | 4 | 0.38 |
| C402A | 1.05 | 0.07 | 2 | 0.75 |
| C402S | 0.86 | 0.14 | 4 | 0.21 |
| C(124, 402)A | 0.82 | 0.33 | 6 | 0.21 |
| C(261, 280)A | 3.20 | 1.48 | 6 | <0.001 |
| C(124, 366, 402)A | 3.61 | 1.72 | 6 | <0.001 |
| C(124, 261, 280, 366, 402)A | 3.98 | 0.50 | 6 | <0.0001 |
| Cys-Null | 4.94 | 1.08 | 6 | <0.0001 |

[0143] TABLE IX
Kinetic constants for Cys-to-Ser/Ala mutants of spHAS.
The Vₘₐₓ values are in μmol of both substrates
incorporated per hour per pmol spHAS. The Kₘ values
for UDP-GIcNAc and UDP-GIcUA were determined at 0.5 mM
UDP-GIcUA and 1.5 mM UDP-GIcNAc, respectively. Experiments
were performed in duplicate or triplicate for the single or
multiple Cys-mutants, respectively. For the wildtype, n = 7.
Values that differ significantly, based on the Student t-test, from
that of the wildtype enzyme are indicated by * (p < 0.05)
or ** (p < 0.001).

| | Vmax | Km UDP-GIcUA | Km UDP-GIcUA | Hill |
|---|---|---|---|---|
| spHAS Construct | (μmol/pmol/h) | (μM) | (μM) | Number |
| Wildtype | 791 ± 215 | 50.4 ± 10.8 | 398 ± 112 | 1.8 ± 0.1 |
| C124A | 617 ± 132 | 37.3 ± 10.1 | 458 ± 60 | 1.8 ± 0.1 |
| C124S | 584 ± 176* | 32.7 ± 0.6 | 459 ± 8.0 | 1.8 ± 0.1 |
| C225A | 852 ± 306 | 62.2 ± 4.1 | 372 ± 26.5 | 1.8 ± 0.1 |
| C225S | 366 ± 37** | 42.7 ± 4.6 | 464 | 1.7 |
| C261A | 923 ± 173 | 42.6 | 454 ± 6.5 | 2.0 ± 0.1 |
| C261S | 764 ± 103 | 45.6 | 499 ± 7.0 | 1.9 ± 0.1 |
| C280A | 264 ± 147** | 33.8 ± 9.7 | 344 ± 45.5 | 1.7 ± 0.1 |
| C280S | 680 ± 90 | 29.4 ± 1.6* | 325 ± 9.0 | 1.8 ± 0.1 |
| C366A | 1201 ± 154** | 56.8 ± 12.8 | 397 ± 1.5 | 1.8 ± 0.0 |
| C366S | 721 ± 121 | 34.1 ± 2.9 | 472 ± 4.5 | 1.8 ± 0.0 |
| C402A | 969 ± 163 | 43.8 ± 9.2 | 427 ± 20.5 | 1.8 ± 0.0 |
| C402S | 774 ± 98 | 44.4 ± 9.4 | 443 ± 35.5 | 1.8 ± 0.0 |
| C(124, 402)A | 894 ± 306 | 39.5 ± 7.0 | 330 ± 38.8 | 1.9 ± 0.1 |
| C(261, 280)A | 436 ± 105* | 54.8 ± 36.7 | 389 ± 20.8 | 1.9 ± 0.1 |
| C(124, 366, 402)A | 1247 ± 127** | 130 ± 21.6** | 285 ± 4.5 | 1.8 ± 0.2 |
| C(124, 261, 280, | 702 ± 112 | 101 ± 24.1* | 471 ± 20.8 | 1.9 ± 0.1 |
| 366, 402)A | | | | |
| Cys-Null | 522 ± 47* | 153 ± 39.3** | 450 ± 40.7 | 1.8 ± 0.1 |

[0144] Assessment of disulfide bond formation. Although Cys residues may not be required for the enzymatic activity of the HAS proteins, they could still be important in the structural integrity and long-term stability of the enzyme as indicated by the reduced expression of the spHAS(C225S) mutant and the increased expression of the spHAS(C124S) and spHAS(C261A) mutants (Table VIII). Cys residues may also be important for maintaining the proper enzyme conformation to allow extrusion of the growing HA chain through the membrane. The primary manner in which Cys residues play structural roles in proteins is by forming either inter- or intra-molecular disulfide bonds. To investigate the possibility of disulfide bonds in spHAS, a chemical labeling approach was utilized to determine the number of Cys residues that are free and, therefore, could not be involved in disulfide bonding. Biotin-PEO-maleimide was allowed to react with purified spHAS, while bound to a Ni⁺²-loaded NTAcolumn, and the modified protein products were then analyzed by MALDI-TOF mass spectrometry (FIG. 13). In nondenaturing conditions, treated wildtype spHAS samples revealed a distribution of derivatized products with increased masses equal to the addition of from one-to-six biotin-PEO-maleimide groups per spHAS, with the majority of the protein being modified by the addition of 5 or 6 groups (FIG. 13A). As a control for this chemical modification approach, samples of spHAS^{Cys-null} were treated with biotin-PEO-maleimide in the same way to verify that no derivitized enzyme products would be formed in the absence of Cys groups. The result (FIG. 13B) demonstrates that no covalent adducts form with the Cys-null protein, which confirms that the modifying reagent is specific for Cys and does not react with any other amino acid side chains. Treatment of the wildtype or Cys-null spHAS proteins with biotin-PEO-maleimide in the presence of 6 M guanidinium hydrochloride gave essentially the same results as obtained in the absence of the denaturing agent, although the degree of modification was slightly greater (not shown). This latter result indicates that spHAS contains no weak disulfide bonds that might be susceptible to reversible reduction when the protein is denatured. The overall results demonstrate that there are no disulfide bonds in the wildtype spHAS enzyme, and that there is a mixed degree of exposure of the six Cys residues in this protein to the biotin-PEO-maleimide reagent in solution.

[0145] Mutant HAS HA size range and prevalent size of HA. Because spHAS mutants in which C280 was substituted with alanine synthesized HA of a lower weight average mass than the spHAS wild type enzyme, other amino acid substitutions were also examined (Table X). For example, the C280T and C280V mutants made HA with a larger size distribution than the wild type, whereas the C280G mutant made HA that had a smaller weight average mass than wild type.

TABLE X
Mutant HAS HA Size Range and Prevalent Size
HA produced by mutants of spHAS and seHAS
in one hour at saturating substrate concentration were
run on 1% agarose gels. Reactions were radiolabeled
by including UDP-[¹⁴C]GlcUA in the reaction mix and
HA product distribution was assessed with a Molecular Dynamics
Phosphoimager. Size was estimated relative to High Molecular
Weight and Kb DNA ladder standards. Distribution of product
is reported as the percentage of total counts (IDV) between
various size ranges. The prevalent HA size produced
(“Peak Size”) is reported as the approximate MW
in MDa at which the greatest IDV intensity was located.
MW ranges are shown as MDa and kbp of DNA in parentheses.
C226A, C262A, C281A, and C367A are mutants of seHAS.

| | | <2 | 2-4 MDa | 4-6 MDa | >6 MDa |
|---|---|---|---|---|---|
| Mutant | Peak Size (MDa) | MDa (<3 Kb) | (3-6 Kb) | (6-9 Kb) | (9->48.5 Kb) |
| WT (spHAS) | 2-3 | 33 ± 5 | 29 ± 8 | 12 ± 2 | 26 ± 8 |
| C280A | ˜1 | 65 ± 12 | 15 ± 2 | 5 ± 3 | 15 ± 7 |
| C280G | ˜1 | 58 ± 10 | 17 ± 5 | 5 ± 2 | 19 ± 4 |
| C280S | 3-4 | 27 ± 4 | 40 ± 3 | 13 ± 3 | 21 ± 3 |
| C280T | 8-32 | 14 ± 2 | 27 ± 2 | 14 ± 3 | 44 ± 4 |
| C280V | 4-5 | 26 ± 3 | 40 ± 2 | 14 ± 3 | 21 ± 6 |
| C124S | ˜2 | 35 | 37 | 13 | 15 |
| C124A | ˜2 | 31 | 33 | 17 | 19 |
| C225S | 3-4 | 33 | 45 | 14 | 8 |
| C225A | 5-6 | 16 | 29 | 23 | 32 |
| C261S | 5-6 | 18 | 31 | 22 | 29 |
| C261A | 4-5 | 22 | 35 | 20 | 23 |
| C366S | ˜2 | 38 | 36 | 11 | 14 |
| C402S | 2-3 | 25 | 36 | 17 | 22 |
| C402A | ˜2 | 34 | 37 | 12 | 17 |
| C402A | ˜2 | 37 | 35 | 12 | 16 |
| C124, 402A | 1-2 | 38 | 0 | 12 | 20 |
| seHAS | 1-2 | 42 ± 21 | 25 ± 7 | 14 ± 5 | 19 ± 9 |
| C226A | ˜5 | 12 ± 1 | 38 ± 2 | 23 ± 0 | 27 ± 1 |
| C262A | 1-2 | 48 ± 0 | 28 ± 1 | 9 ± 0 | 15 ± 1 |
| C281A | 1 | 55 ± 1 | 26 ± 1 | 5 ± 1 | 14 ± 1 |
| C367A | ˜3 | 15 ± 1 | 62 ± 0 | 4 ± 1 | 19 ± 2 |

[0146] The HAS enzymes are unique in that they polymerize two sugars, GlcUA and GlcNAc, in an alternate fashion and simultaneously extrude the growing HA chain through the plasma membrane. The streptococcal HASs are the smallest members of the Class I HAS family, and perform all the functions required for HA synthesis and secretion from cells. Unlike the eukaryotic HAS enzymes, with which they share substantial homology and probably an identical topological organization in their common regions, the streptococcal enzymes have been easier to study because they can be readily overexpressed, purified and characterized. To date, only one eukaryotic enzyme, mouse HAS1, has been overexpressed, purified and characterized kinetically.

[0147] The importance of Cys residues in seHAS and spHAS was initially focused on for three reasons. First, Cys residues play important structural and functional roles in many proteins (e.g., 35). Second, the four Cys residues in seHAS at positions 226, 262, 281, and 367 are completely conserved in the two other streptococcal enzymes, suHAS and spHAS, and are generally conserved in all the other eukaryotic HASs (FIG. 1). Finally, p-chloro-mercurobenzoate had been reported to inhibit HA biosynthesis by the Group A spHAS in a cell-free system (Sugahara et al., 1979). Although no further studies on the role of sulfhydryls in HAS function had appeared since that report, it was important to investigate the possibility that Cys residues may be required for HAS activity.

[0148] The present results demonstrate that a variety of sulfhydryl reagents inhibit both the spHAS and seHAS enzymes. This inhibition could reflect an important role of Cys in the function of these bacterial HAS proteins. However, interpretation of these results is complicated by the fact that Cys-modification creates two changes in the enzyme; the S-H group is eliminated but a new S-R group is also introduced, where R depends on the sulfhydryl reagent used. Because all the R groups are larger than the initial H, modified Cys residues may create new steric constraints for particular enzyme functions such as substrate binding. Alternatively, different degrees of HAS inhibition by different sulfhydryl reagents could indicate their different reactivity towards Cys residues, which would depend upon their size, charge or polarity. The use of site directed mutagenesis to alter the native Cys residues, while subject to the same concerns noted above, provides a complementary approach to determine the importance of Cys residues in HAS function. Both approaches show that although HAS activity is decreased by altering Cys residues, it is not eliminated; the completely modified seHAS and spHAS Cys-null enzymes were still able to perform all of the functions needed for HA synthesis.

[0149] The experiments and results detailed herein demonstrate clearly that neither the seHAS enzyme nor the spHAS enzyme contains any disulfide bonds. It is reasonable to conclude, therefore, that the streptococcal HAS proteins do not have disulfide bonds. It may be more difficult to determine if the eukaryotic HAS proteins contain disulfide bonds, since these proteins are difficult to purify in high yield and contain more Cys residues (≧14) than the streptococcal proteins.

[0150] All HAS enzymes make a broad size range of HA, rather than a discrete size. This heterogeneity of product size may be important biologically for particular functions of the three vertebrate HAS enzymes. In addition, the HA size distribution made varies among the streptococcal HASs and also among the three mammalian HAS isoforms. These enzymatic differences in the size distribution of HA products, which have only been observed in vitro (e.g., in isolated cells or membrane preparations), could have very significant biological consequences if they also occur in vivo in various eukaryote cells and tissues. Numerous studies during the last decade have demonstrated that HA is not simply a structural component of the extracellular matrices of most vertebrate tissues, but also a cell signaling molecule capable of modifying important aspects of cell behavior, including migration and adhesion. The most interesting and surprising aspect of this new paradigm regarding the biological functions of HA is that many cells respond only if the HA is a specific size. In particular, small oligosaccharides of HA have very different biological activities than large, native-size HA.

[0151] An intriguing finding of the present invention is that some, but not all, combinations of Cys-mutations in seHAS cause the enzyme to synthesize HA products having an altered size. Eight of the 19 Cys-mutants examined synthesized HAwith an apparently normal distribution of sizes that were shifted to varying degrees to smaller mass. There was no apparent correlation between changes in HA elongation rate (Vₘₐₓ values) and HA size distribution among these Cys-mutants. The least active seHAS variants, nonetheless, made HA products that were similar in size to the HA made by the wild-type enzyme. The agarose gel electrophoresis technique is very suitable for obtaining a qualitative assessment of size differences. However, it is very difficult to assess the reliability of size assessments outside the narrow range in which migration is proportional to size. For example, several Cys-mutants (e.g., one each of the single, double and triple mutants in FIG. 7) may actually synthesize substantially larger HA than wild-type but the migration differences compared to wild-type are very small. For these reasons, a study to characterize the HA size distributions of these seHAS mutants was undertaken using gel permeation chromatography coupled to dynamic light scattering (MALLS). The present invention demonstrates a role of Cys residues in controlling HA chain length. In particular, the single seHAS Cys-mutant C281A makes much smaller HA, whereas the seHAS C281S mutant makes HA products very similar in size, compared to wild-type seHAS. In addition, the spHAS Cys mutant C280A also makes much smaller HA, as seen in patent application US Publication No. US2003/0082780 A1, published May 1, 2003, the contents of which have been previously incorporated herein by reference in their entirety.

[0152] Although NEM treatment of seHAS caused the velocity maximum (Vₘₐₓ) of the enzyme to decrease, it did not substantially change the Kₘ values for either nucleotide-sugar compared to untreated seHAS. These results indicate that the ability of the NEM-treated enzyme to bind each substrate is not greatly decreased by modification of its Cys residues, but the overall catalytic rate is slowed. In contrast, some of the site specific Cys-mutants showed greater changes in their kinetic constants.

[0153] None of the single Cys-to-Ala or Cys-to-Ser mutants of seHAS or spHAS are inactive, indicating that no single Cys residue plays a critical, necessary role in HA synthesis. The specific HAS activity remaining in the single, double, triple, and Cys-null mutants confirms that Cys is not required at any position within the enzyme for a critical step in HA synthesis. Nonetheless, Cys²²⁶ and Cys²⁶² together appear to play an important role in the activity of seHAS, since the double mutant seHAS(C226,262A) was the least active Cys-mutant with only 2-3% of the wild-type activity. Despite its low activity, this double mutant, nonetheless, synthesized HA of normal size. The triple Cys-mutant seHAS(ΔC3)C²⁸¹ also had very low activity, similar to the double Cys-mutant seHAS(C226,262A), and also synthesized normal size HA. These results indicate that alteration of Cys³⁶⁷ does not cause decrease in HAS activity and is consistent with the single Cys-mutant results in Table IX. In fact, the seHAS C367A and spHAS C366A mutants both exhibited increases in activity over the corresponding wild-type enzymes.

[0154] Interestingly, the lower functionality of seHAS(C226,262A) was substantially relieved by the introduction of a C281A change to create the triple Cys-mutant seHAS(ΔC3)C³⁶⁷. Possibly, a structural or functional constraint, perhaps related to HA chain length, brought about by mutating Cys²²⁶ and Cys²⁶² to Ala is substantially relieved by simultaneously mutating Cys²⁸¹. The triple mutant seHAS(ΔC3)C³⁶⁷ and the Cys-null mutant had similar activities and HA product sizes, suggesting a similar degree of compensation for the otherwise deleterious Cys²²⁶/Cys²⁶² double mutation. The Cys-null mutant of seHAS retained approximately 20% of wild-type activity. The results indicate that Cys²²⁶ and Cys²⁶² play an important role in the overall activity and kinetic characteristics of seHAS, but Cys²⁸¹ may play a role in regulating HA size. Based on the recently determined topology of spHAS and its high level of homology with seHAS (72% identical plus 10% similar residues), we know that Cys²²⁶, Cys²⁶², and Cys²⁸¹ are present in the central domain region of seHAS (FIG. 1), which is the region that contains β-glycosyltransferase family motifs. The topological model predicts that Cys³⁶⁷ is very close to transmembrane domain 4 and is probably not near the glycosyltransferase motifs.

[0155] Based on the NEM-modification and Cys-mutagenesis results, it appears that one or more Cys residues may be located close to the nucleotide-sugar binding sites of the seHAS or spHAS enzymes. This possibility provides a rationale to explain why modification or alteration of these Cys residues interferes with enzyme function and lowers enzyme activity. Preliminary results suggest that either substrate, UDP-GlcUA or UDP-GlcNAc, can protect seHAS from inhibition by NEM (FIG. 6), supporting the premise that at least one Cys residue is located in or near a nucleotide-sugar binding pocket. Substrate binding to this site appears to interfere with the reaction between NEM and the nearby Cys residue(s). Similar conclusions about the proximity of Cys residues to substrate binding sites have been reported for several other proteins, including the lactose permease, glutathione synthetase, glucocorticoid receptor, retinoic acid receptor β, and plasma membrane proton-ATPase. All of these studies found that modification of Cys residues by sulfhydryl reagents decreased the activity of the protein, even though Cys mutagenesis did not inactivate the protein. Another recent study generated 400 Cys-scanning mutants of a tetracycline transporter in order to map the membrane topology and active site of the protein in membrane preparations. The ability of tetracycline to protect only particular Cys residues from reaction with NEM, and subsequent inactivation of the protein, allowed the tetracycline binding site and channel to be mapped.

[0156] Another important consideration in evaluating the importance of Cys residues in spHAS, and the other Class I HAS family members in general, may be their involvement in HA translocation. The mechanism by which these enzymes are able to hold onto the growing HA chain, while they continuously extrude the polysaccharide through the bacterial cell or plasma membrane, is still unknown. This extrusion process is referred to as a translocation, since the HA is not completely transferred across the membrane and released as would occur in a typical transport process. The synthesis and extracellular accumulation by some bacteria of polysaccharides, such as polysialic acid, often requires multiple factors and proteins encoded by very complex multi-gene operons (Moxon and Kroll, 1990; Bliss and Silver, 1996). In contrast, all of the genetic and biochemical evidence to date (reviewed in Weigel, 1998) demonstrate that the streptococcal enzymes are able to initiate HA chain formation and then rapid extension of the HA chain in the absence of any primer or other proteins. Other than the two sugar nucleotide substrates and Mg⁺², the purified spHAS or seHAS enzymes only require a phospholipid (Tlapak-Simmons et al., 1999a) in order to produce high molecular weight HA (>10⁶ Da). In particular, cardiolipin dramatically stimulates the specific activity of detergent solubilized or purified spHAS and seHAS. The size distribution of HA products is very similar for enzyme in isolated membranes or after solubilization with dodecylmaltoside and affinity purification (data not shown). Therefore, the presence of a natural intact phospholipid bilayer and membrane does not affect the ability of the HAS enzymes to synthesize HA. Presently, a suitable assay to evaluate the ability of the wildtype or Cys-mutant enzymes to translocate HA is not available.

[0157] The creation of seHAS^{Cys-null} and/or spHAS^{Cys-null} mutants that retain enzymatic activity enables a more in depth analysis of the tertiary structure of the HAS enzyme and conformational changes that occur during substrate binding, catalysis or HA translocation. To understand these processes, it is necessary to determine the interactions and molecular proximity of various domains within the protein in a more defined way. Cys-scanning mutants of seHAS or spHAS containing a single unique Cys residue at a desired position could enable one to employ electron paramagnetic resonance studies by modifying this Cys residue with a suitable probe. This approach, for example, allowed Voss et al., to determine the proximity of that modified residue to another region of the Lac permease. Similarly, chemical modification of a single unique Cys residue with a fluorescent probe enables a systematic analysis of the localized environment within different regions of the protein. Interacting or proximal domains within seHAS or spHAS may also be determined by assessing the formation of disulfide bonds in specific mutants containing two Cys residues. Such approaches help to elucidate the structure and function of seHAS and increase our understanding of how the HAS family is able to synthesize HA.

[0158] Targeted mutagenesis within two membrane domains of seHAS and generation of the “double switch” mutant. There is a paradox in understanding how HASs polymerize long HA chains. HA chains must be free to move through the enzyme at rapid rates as they are elongated. Thus, one expects that the HA-binding ability of HAS would not be a “high affinity” interaction, since a low off-rate would hinder chain movement (i.e., translocation though the membrane). Yet, HA-binding “affinity” cannot be very low because some chains are held for >10,000 cycles of HA disaccharide assembly and translocation before large HA chains (˜4×10⁶) are released. It is expected that HAS possesses multiple HA-binding regions whose interactions with the growing polymer must be made and broken in a coordinated manner to enable the growing HA chain to translocate within the enzyme without being released prematurely. FIG. 14A illustrates 5 motifs that are putative HA-binding motifs of the type B-X₇-B, where B is a basic amino acid (i.e., Arg or Lys) and X is any amino acid, as described by Yang et al., 1994. It is anticipated that HAS utilizes two types of HA-binding regions; one type that holds and orients the donor HA-UDP chain for assembly of the next disaccharide unit and one type that holds the growing HA chain when it is released from the former site(s) and is translocated through the membrane.

[0159] Although there is no information about the possible HA-binding regions within HAS, it is intriguing that motifs #2-5 are absolutely conserved in the strepHASs and are generally conserved at these positions in the Class I HAS family (i.e., conserved within the same general region of the primary sequence). In addition, although motif #1 in suHAS contains Gln, rather than Arg/Lys (which could still H-bond with HA), it is still a good candidate motif, because partial or “weaker” HA-binding motifs must be considered for the reasons noted above. An overlapping motif at position #1 is highly conserved in the Class I family. Further, complete conservation of HA-binding regions within the Class I family are not expected because the three human HASs intrinsically make HA of different sizes; this reflects the different abilities of HAS1, HAS2 and HAS3 to retain their HA chains. In particular, motif #4 (with Asn rather than RIK) and motif #5 are conserved in all HASs, except the chlorella enzyme.

[0160] The topological organization of spHAS and probably all Class I HASs is shown in FIG. 14B. The experimentally determined topology of spHAS is similar to that initially predicted except for two membrane domains (MD3 and MD6) that are not transmembrane domains (TMDs). The N- and the C-termini and the large central domain are intracellular. The first two TMDs are β-sheets (not α-helices) and create a small extracellular loop that is inaccessible to proteases. MD3 within the large internal central domain is associated with, but does not traverse, the membrane.

[0161] There are then two TMDs connected by a second small extracellular loop that is also inaccessible to proteases. MD6, which has amphipathic helices, is within the C-terminal 50 amino acids of spHAS and does not cross the membrane. Numerous Mds may be required for HAS to create a pore-like structure through which a growing HA chain can be extruded to the exterior. Based on their similarities, all Class I HASs should have similar topological organizations of their spHAS-related domains.

[0162] The presence in all Class I HASs of a possible charge/polar-pair between two membrane domains was noted, and in seHAS, these residues are K48 and E327 (indicated by the ovals in FIG. 14B and as seen in FIG. 15). It is believed that the two charged or polar residues form a salt bridge or strong H-bond link that anchors MD2 (which traverses the membrane from outside to inside) and MD4 (which traverses the membrane from inside to outside).

[0163] To examine the possibility that K48 and E327 interact or are otherwise important for HAS function, we created mutants in which K48 was changed to Arg or Glu and E327 was changed to Asp, Lys or Gln (Table XI). All of these seHAS mutants were expressed, based on Western analysis (FIG. 16A), although the protein levels varied greatly (FIG. 16B). The E327D, K48R, and K48E variants showed near-wildtype expression levels (FIG. 16B). In contrast, the E327Q and E327K variants were expressed poorly. However, adding the K48E mutation restored expression of the seHAS(E327K) protein to wildtype levels. In subsequent kinetic analyses, different amounts of membrane protein were used to compensate, at least partially, for these expression differences.

TABLE XI
SeHAS K48 and E327 Mutants.

| SeHAS Mutant | SEQ ID NO: |
|---|---|
| E327Q | 93 |
| E327D | 94 |
| E327K | 95 |
| K48R | 96 |
| K48E | 97 |
| E327K + K48E | 98 |

[0164] The HAS family members all migrate in SDS-PAGE at a considerably smaller apparent size (DeAngelis et al., 1993; and Weigel et al., 1997), e.g., the ˜49 kDa seHAS migrates as a ˜42 kDa protein. This anomalous behavior indicates that, despite boiling in SDS, these proteins retain substantial secondary or tertiary structure and do not completely unfold. Interestingly, the SDS-PAGE migration rates of seHAS(E327D) and seHAS(K48E) were reproducibly slower than wildtype or the other variants, indicating that these two proteins were more unfolded and more sensitive to denaturation by SDS. Normal migration was restored by adding the E327K change to the seHAS(K48E) protein (FIG. 16A).

[0165] All the seHAS variants had synthase activity, although seHAS(E327K) was barely detectable (Table XII). Vmax values, relative to wildtype, ranged from 0.2% for seHAS(E327K) to 38% for seHAS(E327D). Amino acid changes to similar residues at positions K48 or E327 were generally less disruptive than changes to a dissimilar polar residue. The UDP-sugar Km values for the seHAS mutants were not altered drastically; they differed from wildtype by up to ˜2-fold (not shown). Although seHAS variants with E327 changed to Asp or Gln had good activity, the E327K variant had dramatically less activity (Table XII). However, both the activity and expression of seHAS(E327K) were greatly increased by combining this mutation with the reciprocal change at position 48 to create the seHAS(K48E,E327K) mutant. This double-switch variant was expressed as well as wildtype (FIG. 16B) and exhibited 7.4% of wildtype activity. The conversion of K48 to Glu essentially rescued the seHAS(E327K) enzyme, increasing activity of this variant by >46-fold.

TABLE XII
HA Synthase Activities and Molar Masses of HA Products Produced by
seHAS Variants at K48 and E327.
Multiple experiments using 2-3 independent membrane
preparations were performed to analyze Vmax values and
the weight-average molar mass of HA made by membranes containing the
indicated seHAS variants. Values shown are the mean ± standard
error (n 3).

| SeHAS Variant | Vₘₐₓ (% of wild type) | Molar Mass of HA Products |
|---|---|---|
| Wild Type | 100 | 3.64 ± 0.07 |
| E327D | 38 ± 2.0 | 3.20 ± 0.01 |
| E327Q | 27 ± 4.1 | 1.52 ± 0.38 |
| E327K | 0.16 ± 0.2 | Not detected |
| K48E | 6.7 ± 0.2 | 0.68 ± 0.02 |
| K48R | 17.2 ± 2.6 | 1.89 ± 0.10 |
| E327K & K48E | 7.5 ± 0.3 | 0.61 ± 0.09 |

[0166] If the K48 and E327 residues in seHAS mediate an interaction between MD2 and MD4, then their disruption could destabilize a putative intramolecular pore, through which the enzyme translocates HA. Perturbing this pore might alterthe rate atwhich HAS could translocate a growing HA chain (resulting in a decreased synthesis rate), and also affect the ability of HAS to retain the growing HA chain, resulting in smaller HA products. These results, therefore, support the idea that K48 and E327 interact with each other and that MD2 and MD4 are close enough for these residues to form an ion-pair or H-bonds.

[0167] There are no reports using SEC-MALLS to characterize HA made by membranes containing HAS, despite the fact that MALLS is one of the best techniques to assess the size distributions and absolute masses of polydisperse HA. A procedure was recently developed by the inventors to perform such analyses, and this new approach was used to quantify possible differences in HA size made by these seHAS variants (FIGS. 17 and 18). The weight-average molar mass values are summarized in Table XII. The gel filtration profiles show that the distributions of HA products remained normal (i.e., approximately symmetric) even though the mutants made smaller HA (FIG. 17). The seHAS(K48E) and seHAS(K48E,E327K) variants made the smallest HA, with essentially identical molar masses. The weight-average masses of HA products made by the wildtype enzyme and seHAS(K48E,E327K) were 3.64 MDa and 0.61 MDa, respectively (FIG. 18, Table XII). FIG. 18 illustrates the high quality light scattering data that can be obtained for HA made by membranes expressing seHAS.

[0168] HA synthesis mediated by the streptococcal HASs occurs at the reducing end, and growing HA-UDP chains are assembled in a processive manner. These enzymes are unable to rebind and extend HA chains once they are released. Although good progress has been made in understanding HAS topology and the mechanism of HA chain elongation, several key questions about HAS function remain unanswered. One question is how HAS controls HA product size. A second is the mechanism by which the HA products are transferred to the cell exterior, since the active sites of the enzyme are intracellular. Others have suggested that HAS makes HA inside the cell and that HA-specific ABC transporters then transport HA to the outside of the cell.

[0169] It is believed that membrane-bound HASs are inherently able to translocate HA chains across the bilayer during biosynthesis. This hypothesis is based on a variety of findings, including that the UDP-sugar binding sites are located at or very near the membrane-HAS interface and, unlike virtually all other glycosyltransferases, the HASs are phospholipid-dependent and have multiple trans-membrane domains. In addition, the genetic and biochemical data show that if substrates are present, HAS is the only protein required for HA biosynthesis. When bacteria that do not normally make HA are transformed with the hasA gene and genes for the synthesis of UDP-sugar precursors, the cells make and, importantly, secrete HA into the medium. For example, no other exogenous genes except hasA are needed for Enterococcus faecalis or Bacillus subtilis cells to accumulate HA in the culture medium.

[0170] Based on radiation inactivation analysis of two streptococcal HASs and Xenopus HAS1, the active membrane-bound enzymes contain only a single HAS protein (rather than an oligomer), but the protein is associated with an additional mass of ˜23 kDa. This extra mass could not be identified for the active HAS1 enzyme, but was identified as cardiolipin for the streptococcal enzymes. Thus, an active streptococcal HAS is one protein in complex with about 16 molecules of cardiolipin. When purified in the absence of cardiolipin, the streptococcal HASs show very low activity, but when this phospholipid is restored, enzyme activity increases ˜10-fold. Therefore, all HAS family members might require lipid in order to synthesize HA, but different HASs may require different types of lipids. It is proposed that cardiolipin molecules help the enzymes to create a pore-like passage within the HAS-lipid complex, through which a growing HA chain passes.

[0171] If the MDs of HAS form a pore through which HA passes during biosynthesis, then there are likely to be very specific interactions between MDs that stabilize this structure and mediate its cycle of making and breaking interactions with the HA chain as the HA-UDP is alternately translocated or extended. The results show that changing either K48 or E327 can inhibit enzyme activity and alter HA product size and support the possibility that K48 and E327 are binding partners that mediate interaction between MD2 and MD4. This latter conclusion is supported strongly by the rescue of both protein expression and enzyme activity in the double-switch mutant, compared to the E327K mutant. Although other explanations can be proposed for rescue of the E327K variant by introducing the K48E change, the simplest is that the E and K residues at these two positions directly interact. Based on the topology of seHAS, K48 and E327 are within the same region of the bilayer (FIG. 14B), and could interact physically. Due to the very short extracellular loops of HAS, MD1-MD2 and MD4-MD5 are likely to be adjacent MD pairs (e.g., FIG. 14C).

[0172] It is also possible that the two polar residues within MD2 and MD4 interact with polar groups in HA and are involved in the HA alignment or translocation process during synthesis. When the enzyme is not engaged in HA synthesis, then the two side chains might directly interact as suggested above. An interesting hybrid of these two ideas is that K48 and E327 could switch between these two states in an alternating way (i.e., interacting with each other versus with HA) during chain elongation and translocation. Translocation of HA through the enzyme would likely require the coordinated movement of one or more MDs bound to the chain in order to achieve HA movement. This would have to be a cyclic process in which the interactions between residues in HAS and specific groups within the HA chain were made and then broken as the chain was translocated in a ratchet-like manner through the membrane to the cell exterior.

[0173] Although changing either residue influences HA product size, E327 appears to be more critical for seHAS activity than K48. Changing E327 to the very similar Asp had minimal effect on protein expression and reduced HA product size by only ˜12%, whereas changing E327 to Lys destabilized the protein, reduced expression, and drastically inhibited activity. The K48R and K48E mutants were both well expressed, indicating that these changes did not destabilize the protein. The slower migration of seHAS(K48E) in SDS-PAGE and its smaller HA product size (˜19% of wildtype) are consistent with the mutant protein being less compact and hindered in either HA bond formation, HA trans-location or both. All of these results are interpreted to indicate that E327 participates in H-bonding or ionic interactions that are structurally important. The relative tolerance to changes at K48 suggests that if this residue interacts with E327, then E327 likely also has important interactions with other residues. The two side chains could interact either directly or indirectly through water, phospholipid head groups, or other side chains.

[0174] The results in the present study indicate that there is not a simple correlation between the affects of a mutation on enzyme activity compared to enzyme stability, as assessed by migration in SDS-PAGE. A possible explanation for this is that both K48 and E327 also likely interact with other residues in HAS and possibly with groups in HA, as noted above. If these two residues interact in a complex, alternating cyclic manner, with side chains in the protein and in HA, then correlations among enzyme activity, protein stability and domain flexibility may not be apparent for individual mutants or may be too complex to sort out without substantially more structural information.

[0175] A pore region within HAS would have multiple contacts with the growing HA-UDP chain. Differences in the energetics of these intermolecular contacts among the three eukaryotic HAS isozymes could alter the balance between HA-retention and HA-release forces and result in inherent differences in HA size distributions made by HAS variants or native HAS isozymes (44). For example, a mutation that decreased HA retention by HAS could result in decreased average HA product size. Further studies are needed to test this model and to elucidate the roles of K48, E327, and other conserved amino acids in the ability of HAS to make HA of a particular size.

[0176] Mutations of a vertebrate HAS also affect HA size distribution. As reported by the inventors in Pummill et al., 2003 (JBC, 278:19808-19814, the contents of which are hereby expressly incorporated herein by reference), site-directed mutagenesis was utilized to examine the differences in size distribution of HA produced by various mutants of the vertebrate HAS enzyme from Xenopus laevis, referred to as xlHAS1. It was discovered that certain xlHAS1 mutants with substitutions for the serine at position 77 synthesize HA products with different size distribution, and of the Ser77 mutants created, S77F and S77I created a larger HA product while S77T created a smaller HA product. On the other hand, S77A, S77D, S77V, S77Y/R271G, and Y107F all made HA with an average size similar to that of wild type xlHAS1. As can be seen in FIG. 19, the average size of HA produced by S77T starts to fall behind that of wild type after 5 min. The average size of HA produced by S77T is smaller than that of wild type even after incubation for 60 min. S77F and S77I make HA with a larger average product size than wild type for all time points after 5 min.

[0177] Several cysteine to serine mutants were also tested for changes in the size of the HA product. As shown in FIG. 20, C117S and C239S consistently made larger HA than that of wild type, whereas C337S made HA that was consistently smaller. The results obtained from the gel filtration experiments shown in FIGS. 19 and 20 were confirmed by electrophoretic analysis of the HA produced by wild type and mutant enzymes. The average HA product size was larger than that of wild type for C117S, C239S, S77F, and S77I but smaller for C337S and S77T (FIG. 21).

[0178] Alteration of Hyaluronan Product Size by Expression of Synthases with Multiple Mutations. It has been demonstrated herein that the size of HA produced by cells expressing a HAS gene can be altered by mutating the HAS gene at single amino acid residues. It has also been demonstrated herein that by mutating a single amino acid residue of xlHAS1, namely S77, the size of the HA produced by the HAS could be increased or decreased, depending on the amino acid substitution. An alignment of the amino acid sequences of xlHAS1 and seHAS indicate the presence of a region in seHAS similar to that of the S77 region in xlHAS1. Primers were designed that would mutate the amino acid residues in this region of seHAS, ⁵¹LSF⁵³, and the effect on the size of HA produced by cells expressing these mutants was investigated.

[0179] The results of the agarose gel electrophoretic analysis of the HA produced by several of the seHAS enzymes with mutations in the ⁵¹LSF⁵³ region are shown in FIG. 22. The results are also summarized in Table XIII. As can be seen, the amount and size of HA produced by these enzymes when expressed in recombinant host cells can be altered by mutating one or more of the amino acid residues in this region. In all cases save one, the mutation of all three amino acid residues led to the inability to observe any HA production by the synthase. Several mutants, including the single mutants seHAS[F53S] and seHAS[F53T], produce HA that is less than half the size of the HA that is produced by wild-type seHAS (Table XIV).

TABLE XIII
⁵¹LSF⁵³ Mutants

| Mutation | | | Effect on HA (compared to RB227[seHAS]) | | |
|---|---|---|---|---|---|
| 51 | 52 | 53 | Production | Size | SEQ ID NO: |
| F | F | f | none detected | not applicable | 99 |
| F | F | l | none detected | not applicable | 100 |
| F | L | T | none detected | not applicable | 101 |
| F | T | L | low | much smaller | 102 |
| F | T | T | none detected | not applicable | 103 |
| l | l | S | none detected | not applicable | 104 |
| l | L | f | none detected | not applicable | 105 |
| l | s | f | similar | slightly smaller | 106 |
| l | s | l | moderate | much smaller | 107 |
| l | s | L | moderate | much smaller | 108 |
| l | s | S | moderate | smaller | 109 |
| l | s | T | moderate | much smaller | 110 |
| l | l | L | low | much smaller | 111 |
| l | s | S | moderate | smaller | 112 |
| l | s | T | moderate | smaller | 113 |
| l | T | f | moderate | smaller | 114 |
| l | T | T | moderate | smaller | 115 |
| S | F | l | none detected | not applicable | 116 |
| S | T | l | none detected | not applicable | 117 |
| T | l | S | none detected | not applicable | 118 |
| T | l | T | none detected | not applicable | 119 |
| T | s | l | moderate | smaller | 120 |
| T | s | L | moderate | much smaller | 121 |
| T | s | S | moderate | smaller | 122 |
| T | s | T | moderate | smaller | 123 |

The letters in the column under each position indicate the amino acid present at that location.
A capital letter indicates a change from the residue present in the wild-type seHAS.

[0180] TABLE XIV
GPC-MALLS Results with ⁵¹LSF⁵³ Mutants.
Clarified media from the samples used for FIG. 22 were
diluted to ˜25 mg/ml HA based on the agarose gel results.
200 μl was injected onto the GPC columns, and the eluate
was monitored for HA molar mass by MALLS. The midpoint
of the refractive index peak for the eluate is listed as the
retention volume.

| | | Mw |
|---|---|---|
| HAS | Retention Volume (ml) | Molar Mass (g/mol) |
| seHAS | 14.2 | 2.34 × 10⁶ |
| seHAS[ISL] | 16.3 | 9.46 × 10⁵ |
| seHAS[IST] | 16 | 1.01 × 10⁶ |
| seHAS[LSS] | 15.3 | 1.07 × 10⁶ |
| seHAS[LST] | 15.4 | 9.07 × 10⁵ |

[0181] TABLE XV
SeHAS mutants with multiple mutations.

| | SEQ ID |
|---|---|
| Mutant | NO: |
| seHAS[F349C] | 124 |
| seHAS[F349D] | 125 |
| seHAS[F349Y] | 126 |
| seHAS[F349G] | 127 |
| seHAS[K31T] | 128 |
| seHAS[K31T, F349G] | 129 |
| seHAS[K31S] | 130 |
| seHAS[K31S, F349G] | 131 |
| seHAS[K31N] | 132 |
| seHAS[K31N, F349G] | 133 |
| seHAS[K31Y] | 134 |
| seHAS[T268V] | 135 |
| seHAS[T268V, F349G] | 136 |
| seHAS[T268I] | 137 |
| seHAS[T268I, 349G] | 138 |
| seHAS[T268L] | 139 |
| seHAS[T268L, F349G] | 140 |
| seHAS[N317I] | 141 |
| seHAS[N317I, F349G] | 142 |
| seHAS[N317K] | 143 |
| seHAS[N317K, F349G] | 144 |
| seHAS[N317T] | 145 |
| seHAS[N317R] | 146 |
| seHAS[G344N] | 147 |
| seHAS[G344D] | 148 |
| seHAS[G344E] | 149 |
| seHAS[G344K] | 150 |
| seHAS[T268I, N317I, F349G] | 151 |
| seHAS[T268I, N317T, F349G] | 152 |
| seHAS[T268I, N317R, F349G] | 153 |
| seHAS[T268I, trunc. @ 342) | 154 |
| seHAS[T268I, G344K, F349G] | 155 |
| seHAS[T268I, G344E, F349G] | 156 |
| seHAS[T268I, N317K, F349G] | 157 |
| seHAS[T268I, N317K, G344K, | 158 |
| F349G] | |
| seHAS[T268I, N317R, G344K, | 159 |
| F349G] | |
| seHAS[T268I, N317T, G344K, | 160 |
| F349G] | |

[0182] TABLE XVI
GPC-MALLS Results for HAS with Multiple Mutation Sites.
Clarified media from the samples used for FIG. 23 were
diluted to ˜25 μg/ml HA based on the agarose gel results.
200 μl was injected onto the GPC columns, and the eluate was
monitored for HA molar mass by MALLS. The midpoint of the
refractive index peak for the eluate is listed as the
retention volume.

| | Retention | | Retention | |
|---|---|---|---|---|
| | Volume | Mw Molar | Volume | Mw Molar |
| HAS | (ml) | Mass (g/mol) | (ml) | Mass (g/mol) |
| | Experiment 1 | | Experiment 2 | |
| seHAS | 14.2 | 2.34 × 10⁶ | 14.1 | 2.49 × 10⁶ |
| seHAS[F349G]-1 | 13.9 | 3.13 × 10⁶ | 13.8 | 3.15 × 10⁶ |
| seHAS[K31T]-1 | 14.1 | 2.08 × 10⁶ | 14.1 | 2.57 × 10⁶ |
| seHAS[K31T, F349G]-1 | | | 13.8 | 3.20 × 10⁶ |
| seHAS[K31S]-3 | | | 14.2 | 2.45 × 10⁶ |
| seHAS[K31S, F349G]-2 | | | 13.8 | 3.45 × 10⁶ |
| seHAS[K31N]-1 | | | 14.2 | 2.18 × 10⁶ |
| seHAS[K31N, F349G]-2 | | | 13.8 | 2.67 × 10⁶ |
| seHAS[T268V]-1 | 13.9 | 2.56 × 10⁶ | 13.8 | 2.22 × 10⁶ |
| seHAS[T268V, F349G]-3 | | | 13.7 | 3.11 × 10⁶ |
| seHAS[T268I]-1 | 13.8 | 2.55 × 10⁶ | 13.8 | 3.55 × 10⁶ |
| seHAS[T268I, F349G]-1 | | | 13.6 | 3.74 × 10⁶ |
| seHAS[T268L]-1 | 14.4 | 2.18 × 10⁶ | 14.5 | 1.8 × 10⁶ |
| seHAS[N317I]-1 | 14.4 | 1.91 × 10⁶ | 14.2 | 2.66 × 10⁶ |
| seHAS[N317I, F349G]-1 | | | 14 | 3.44 × 10⁶ |
| seHAS[N317K] | | | 13.9 | 3.5 × 10⁶ |
| seHAS[N317K, F349G]-3 | | | 13.8 | 3.46 × 10⁶ |
| seHAS[K31Y]-2 | 14.2 | 2.55 × 10⁶ | 14.2 | 2.79 × 10⁶ |
| seHAS[F349C]-1 | 14.3 | 2.31 × 10⁶ | 14.3 | 1.83 × 10⁶ |
| seHAS[F349D]-2 | 14.8 | 1.57 × 10⁶ | 15 | 2.03 × 10⁶ |
| seHAS[F349Y]-2 | 14.7 | 1.15 × 10⁶ | 14.6 | 1.89 × 10⁶ |
| seHAS[N317T]-1 | | | 14 | 2.94 × 10⁶ |
| seHAS[N317R, R353G]-2 | 14.4 | 1.6 × 10⁶ | | |
| seHAS[N317R]-2 | 14 | 2.92 × 10⁶ | 13.9 | 3.22 × 10⁶ |
| seHAS[G344N]-3 | | | 14.3 | 2.32 × 10⁶ |
| seHAS[G344D]-2 | | | 14 | 3.18 × 10⁶ |
| seHAS[G344E]-2 | 13.9 | 2.58 × 10⁶ | 13.8 | 3.62 × 10⁶ |
| seHAS[G344K]-1 | 13.7 | 3.27 × 10⁶ | 13.9 | 3.04 × 10⁶ |
| | Experiment 3 | | Experiment 4 | |
| seHAS-1 | 14.2 | 2.1 × 10⁶ | 14.1 | 2.16 × 10⁶ |
| seHAS-2 | | | 14.2 | 2.4 × 10⁶ |
| seHAS[F349G]-1 | | | 14 | 2.71 × 10⁶ |
| seHAS[F349G]-3 | | | 14.1 | 2.31 × 10⁶ |
| seHAS[T268I]-1 | | | 14.1 | 2.57 × 10⁶ |
| seHAS[T268I]-3 | | | 14 | 3.05 × 10⁶ |
| seHAS[T268I, F349G]-1 | 13.7 | 3.02 × 10⁶ | 13.8 | 3.14 × 10⁶ |
| seHAS[T268I, F349G]-3 | 13.5 | 3.37 × 10⁶ | 13.8 | 2.95 × 10⁶ |
| seHAS[T268I, N317R, F349G]-1 | 13.7 | 3.48 × 10⁶ | | |
| seHAS[T268I, N317R, F349G]-3 | 13.9 | 2.96 × 10⁶ | | |
| seHAS[G344K]-1 | | | 13.8 | 3.06 × 10⁶ |
| seHAS[G344K]-2 | | | 13.8 | 3.07 × 10⁶ |
| seHAS[T268I, G344K, F349G]-1 | 13.8 | 3.44 × 10⁶ | 14 | 2.67 × 10⁶ |
| seHAS[T268I, G344K, F349G]-3 | 13.8 | 3.33 × 10⁶ | 13.7 | 3.44 × 10⁶ |
| seHAS[T268I, G344E, F349G]-1 | 13.9 | 3.11 × 10⁶ | | |
| seHAS[T268I, N317K, G344K, F349G]-1 | | | 13.8 | 3.64 × 10⁶ |
| seHAS[T268I, N317K, G344K, F349G]-2 | | | 14 | 2.68 × 10⁶ |
| seHAS[T268I, N317R, G344K, F349G]-1 | | | 13.7 | 3.22 × 10⁶ |
| seHAS[T268I, N317R, G344K, F349G]-2 | | | 13.9 | 3.46 × 10⁶ |

[0183] In addition, two other HASs with single amino acid mutations (N317K and G344D) and one with three amino acid mutations (K31T, T268I, F349C) have been found to produce 50-90% larger HA than that produced by wild-type seHAS, when the HASs were expressed in B. subtilis RB227 cells grown overnight at 37 C in minimal medium. Therefore, it was determined if the HA product size could be increased to a further extent by expressing HASs with various combinations of these amino acid mutations (see Table XV).

[0184] The results of the agarose gel electrophoretic analysis of several of the single mutants are shown in FIG. 23A. It is clear that by altering one amino acid residue in the HAS, the resulting HA products made by recombinant host cells can be effected in both amount and size. The effect can vary at each position depending on which substituting amino acid is used. The ability to alter the size of the HA product is supported by the MALLS data shown in Table XVI, Experiment 1. Based on the single mutation data, seHAS[F349G] was used as a template for the second round of site-directed mutagenesis to obtain the desired double mutants. The results for the double mutants are shown in FIG. 23B and Table XVI, Experiment 2. Again, based on the results from the agarose gel electrophoresis and MALLS analysis, seHAS[T268I, F349G] was chosen as the template for the production of the triple mutants. The data for the triple mutants can be seen in FIG. 23C and Table XVI, Experiment 3. Finally, seHAS[T268I, G344K, F349G] was chosen as the template for the production of quadruple mutants, and the data for these mutants is shown in FIG. 23D. In order to provide a summary of the data, an agarose gel electrophoresis experiment, along with MALLS analysis, was performed on a selection of the mutants. The results for this summary experiment are shown in FIG. 23E and Table XVI, Experiment 4.

[0185] As described above for the ⁵¹LSF⁵³ mutants, it can be clearly seen that by altering a single amino acid residue, the size of the HA product can be effected. Altering two different amino acid residues had various effects on the HA product size. For the K31 mutants, the addition of the F349G mutation brought the HA product size up close to that of seHAS[F349G] by itself. SeHAS[T268L] by itself made smaller HA than wild-type seHAS, but when it was combined with F349G, almost all HAS activity was lost. SeHAS with a T268I change alone made larger HA than wild-type seHAS, and when this mutation was combined with F349G even larger HA was produced.

[0186] It has been previously shown by the inventors that the HA product size for a given HAS can be altered by mutating amino acid residues in the HAS. However, these experiments were done in vitro and usually dealt with single amino acid mutations. It has been demonstrated herein that the HA product size in vivo can be increased or decreased by a single amino acid mutation. Also, by combining different mutations, the effect can be even greater. The size of HA obtained from the T268I/F349G seHAS mutant (3.74 MDa) is larger than that obtained from any of the single mutants. In the last experiment, the size of HA produced by seHAS[T268I, N31 7K, G344K, F349G] (3.64 MDa) is larger than that produced by any other mutant during that experiment.

### Materials and Methods

[0187] Vectors, Primers, and Reagents. pEx-1 was purchased from Promega as part of the Altered Sites Mutagenesis kit. The expression vector pKK223 was from Pharmacis Biotech Inc. E. coli SURE cells were from Stratagene. Successful mutagenesis was achieved with the QUICK CHANGE™ Mutagenesis kit from Stratagene. Primers were synthesized by The Great American Gene Company (Ransom Hill Bioscience, Inc., CA), NBI, or Midland Certified Reagent Company. All of the mutagenic oligonucleotides were synthesized by Genosys Biotechnologies, Inc. (Spring, Tex.) and were purified by reverse-phase chromatography. Cy-5 fluorescent sequencing primers were synthesized by the Molecular Biology Resource Facility, Oklahoma University Health Sciences Center. Nonradiolabeled UDP-GlcUA, and 2,4,6-trihydroxyacetophenone were from Fluka. UDP-GlcNAc was from Sigma. UDP-[¹⁴C]GlcUA (300 mCi/mmol) and ¹⁴C-NEM (40 mCi/mmol) were from New England Nuclear. Agarose was from Bio-Rad. (+)-Biotinyl-3-maleimidopropionamidyl-3,6-dioxaoctanediamine (biotin-PEO-maleimide) was from Pierce Chemical Co. NEM and all other reagents were from Sigma unless otherwise noted. To confirm the entire ORF of HAS mutants, DNA sequencing was performed either using the T7 or PCR sequencing kits from Amersham, or by the micro-sequencing facility operated by the Department of Microbiology & Immunology at the University of Oklahoma Health Sciences Center. Anti-His₅ monoclonal antibody and Ni⁺²-NTA resin were from Qiagen.

[0188] Site-Directed Mutagenesis. The seHAS gene with a fusion at the 3′ end encoding a His₆ tail (seHAs-His₆) was cloned into pKK233. Mutagenic primers were designed to change the cysteines to either Ala or Ser at positions 226, 262, 281 and 367. Two complementary oligonucleotide primers encoding the desired mutation were used to create the single Cys mutations (Table XVII). Mutagenesis was carried out using the Quick Change method according to the manufacturer's instructions. The pKK233 plasmid containing the seHAS-His₆ gene was grown in SURE cells, purified using a Spin Miniprep Kit (Qiagen) and analyzed by agarose gel electrophoresis to verify the correct size. The purified pDNA was used as the template for the primer extension reaction with a pair of mutagenic primers. The PCR Amplification conditions for PCR, using pfu DNA polymerase, were 16 cycles of the following: 95° C. for 1 min, 58° C. for 1 min, and 68° C. for 18 min. This amplification generated mutated plasmids with staggered nicks, which was then treated with DpnI to digest the methylated and hemi-methylated parental DNA. The digested pDNA was transformed into SURE cells and colonies were screened for the desired mutations by sequencing the isolated plasmid DNA using fluorescently labeled terminators (ABI Prism 377 MODEL program, v2.1.1). The complete ORFs of selected mutants were confirmed by sequencing in both directions with Cy-5 labeled vector primers on a Pharmacia ALF Express DNA Sequencer. Data were analyzed using ALF Manager, v3.02. The double, triple and null Cys-mutants of seHAS-His₆ were made using the appropriate single, double or triple Cys-mutant plasmid DNA as the template, respectively.

TABLE XVII

Synthetic oligonucleotides used to make
seHAS mutants
The boldface font indicates the altered
codon. All primers shown are in the
sense orientation.

SEQ

| | |
|---|---|
| seHAS | ID |

| | | |
|---|---|---|
| mutant | Sequence | NO: |

| | | |
|---|---|---|
| C226A | 5′-GGTAATATCCTTGTTGCCTCAGGTCCGCTTAGC | 161 |
| C226S | 5′-GGTAATATCCTTGTTTCCTCAGGTCCGCTTAGC | 162 |
| C262A | 5′-ATTGGTGATGACAGGGCCTTGACCAACTATGCA | 163 |
| C226S | 5′-ATTGGTGATGACAGGTCCTTGACCAACTATGCA | 164 |
| C281A | 5′-CAATCCACTGCTAAAGCTATTACAGATGTTCCT | 165 |
| C281S | 5′-CAATCCACTGCTAAATCTATTACAGATGTTCCT | 166 |
| C367A | 5′-TTCATTGTTGCCCTGGCTCGGAACATTCATTAC | 167 |
| C367S | 5′-TTCATTGTTGCCCTGTCTCGGAACATTCATTAC | 168 |

[0189] TABLE XVIII

Oligonucleotides for Cys-to-Ser/Ala site
directed mutagenesis of spHAS. Cys
residues within spHAS at positions 124,
225, 261, 280, 366 and 402 were converted
either to Ser using a single mutagenic
oligonucleotide, complementary to the
coding strand, and the Altered Sites kit
or to Ala using a pair of complementary
mutagenic oligonucleotides and the Quick
Change Mutagenesis kit (in the latter
case only the forward primers
complementary to the coding strand are
shown). The altered codons are indicated
in boldface.

SEQ

| | | |
|---|---|---|
| SpHAS | Mutagenic | ID |

| | | |
|---|---|---|
| mutation | Oligonucleotide | NO: |

| | | |
|---|---|---|
| (C124S) | 5′-TAACGTTTCGAGAAATATCCAC | 169 |
| (C225S) | 5′-GGTCCTGAGGAAACTAAAAT | 170 |
| (C261S) | 5′-ATTTGTTAAAGATCGATCATC | 171 |
| (C280S) | 5′-ATCAGTATCAGATCTAGCTGT | 172 |
| (C366S) | 5′-AACATTACGAGATAAAGCAAC | 173 |
| (C402S) | 5′-TTTAATGGTGGATAAAGAATA | 174 |
| (C124A) | 5′-AACGATAACGTTTCGAGCAATATCCACTTCTCT | 175 |
| (C225A) | 5′-CAATGGTCCTGAGGCAACTAAAATATTACC | 176 |
| (C261A) | 5′-AGCATAATTTGTTAAAGCTCGATCATCCCCAAT | 177 |
| (C280A) | 5′-AGGTACATCAGTATCAGCTCTAGCTGTTGATTG | 178 |
| (C366A) | 5′-AACATTACGAGCTAAAGCAAC | 179 |
| (C402A) | 5′-CGTATTTTTAATGGTGGCTAAAGAATAAAGTTT | 180 |

[0190] Single mutants of spHAS were generated by the Altered Sites Mutagenesis or Quick Change Mutagenesis protocols using primers (Table XVIII) designed to change the Cys residues at positions 124, 225, 261, 280, 366, or 402 of spHAS containing His₆ at the C-terminus (Tlapak-Simmons, et al., 1999a). After generating and confirming the entire sequence of each spHAS(Cys-to-Ser) mutant produced in the Altered Sites vector, internal restriction sites within the HAS ORF were used to transfer mutated regions to the spHAS insert in pKK223 (this vector carrying HAS is designated pKK3K). Cys-to-Ala mutants of spHAS were generated directly in the pKK3K vector using the Quick Change mutagenesis method. Site directed mutagenesis was used to generate the C124, C402A double mutant, and then C366A was added by restriction fragment exchange to generate a triple mutant. Site directed mutagenesis was also used to create the double mutant spHAS(C261A,C280A). The mutants containing five or six mutated Cys residues were generated by utilizing restriction sites to combine fragments of spHAS containing different mutations. For example, AvrII and MfeI were used to combine the spHAS(C124A,C366A,C402A) triple Cys-mutant and the spHAS(C261A,C280A) double mutant to create spHAS with only Cys²²⁵ intact. Finally, BglII and AvrII were used to splice spHAS(C225A) into the latter quintupleCys-mutant to generate the Cys-null clone, designated spHAS^{Cys-null}. All Cys-to-Ala/Ser mutants were confirmed over the full ORF by automated DNA sequencing.

[0191] Effect of sulfhydryl reagent treatments on seHAS and spHAS activity and determination of the kinetic constants of seHAS Cys mutants. E. coli SURE cells transformed with plasmids 9containing various seHAS mutants were grown in LB medium with vigorous shaking at 32° C. to A₆₀₀ ˜0.8 and induced with 1 mM isopropyl-p-thiogalactoside for 3 h. Cells were harvested and membranes were prepared as described previously. The kinetic constants for HAS were determined at 37° C. in 100 μl of 50 mM sodium and potassium phosphate, pH 7.0, with 20 mM MgCl₂, 1 mM DTE, 240 μM UDP-GlcUA, 0.7 μM UDP-[¹⁴C]GlcUA and 0.6-1.0 mM UDP-GlcNAc. in 100 μl of 25 mM sodium and potassium phosphate, pH 7, containing 50 mM NaCl, 20 mM MgCl₂, 1 mM dithiothreitol, 1 mM UDP-GlcUA, 0.68 μM UDP-GlcUA and 1 mM UDP-GlcNAc. Some assays also contained 0.1 mM EDTA and 20% glycerol (v/v). To initiate the enzyme reaction, ˜0.5-40 μg of membrane protein was added and the mixtures were gently shaken in a MicroMixer X-36 (Tiatec) at 30° C. for 1-2 h. Reactions were terminated by the addition of SDS to a final concentration of 2% (w/v). The incorporation of radioactive [¹⁴C]GlcUA was determined by descending paper chromatography and the Kₘ and Vₘₐₓ values were determined as described by Tlapak-Simmons et al (1999b). Data were analyzed by the methods of Michaelis-Menton or Hill. Protein content was determined by the method of Bradford using bovine serum albumin as the standard. All Cys-mutant or sulfhydryl-treated seHAS samples were assayed in duplicate or triplicate using two or three independent membrane preparations. Results are presented as the mean ± standard errors. All enzyme assays were performed under conditions that were linear with respect to time and protein concentration. None of the seHAS variant enzymes were unstable under the conditions employed.

[0192] Determination of HA size produced by seHAS variants. The relative Mᵣ of the HA synthesized by wild-type seHAS or the Cys-mutants was determined by agarose gel electrophoresis of ¹⁴C-labeled HA products synthesized under the assay conditions described above. The wild-type seHAS synthesizes and releases an HA chain in <5 min under these steady-state conditions, so that each enzyme molecule on average synthesizes >10 HA chains during the incubation. Reactions were terminated by heating at 95° C. for 1 min, the mixtures were then centrifuged at high speed and the HA-containing supernatants were recovered. The samples were concentrated ˜10-fold using Microcon YM-3 filters (Amicon Bioseparations, Inc.) and treated with DNase and RNase (4 μg/ml each) in the presence of 60 mM MgCl₂ for 30 min at 22° C. The samples and a combination of DNA standards were then electrophoresed on a 1.3% (w/v) agarose gel at 80-90 V. The gels were dried without heating and exposed to Biomax-MR film (Kodak) for 1-4 weeks. The autoradiograms were scanned to create digital files using a Fluorchem™8000 (Alpha Innotech Corp.) image analysis station. As a control, samples were treated with Streptomyces hyaluronate lyase (80 units) at 37° C. overnight, which resulted in the complete loss of radiolabeled bands.

[0193] Determination of HA Chain Length Produced by spHAS Variants (Table X). HAS mutant HA size distribution was determined by agarose gel electrophoresis. Membranes containing wildtype or mutant Has were incubated in 0.5 mM UDP-GlcUA and 1.5 mM UDP-GlcNAc in 25 mM sodium/potassium phosphate, pH 7.0, 75 mM NaCl, 1 mM DTT, 15% glycerol, 10 mM MgCl₂, with 0.68-8.16 μM UDP-[¹⁴C]GlcUA for one hour at 30 C, while shaking in a Taitec E-36 micromixer. EDTA was added to 0.1 M to stop the reactions. 1 mg/ml ovine testicular hyaluronidase was added to control tubes and incubated 1 hour at 37 C to ensure the product formed was HA. 5 mg/ml Pronase was added to digest protein components that may bind HA, and the reactions were incubated >12 hours at 4 C. Reactions were either loaded directly to 1% agarose gels or were ethanol precipitated prior to loading. Components of the reaction were retained in or near the wells after electrophoresis. Ethanol precipitation was done to reduce this contamination. Reactions were centrifuged at 21,000×g for 10 min. One-tenth the volume of 3 M sodium acetate, pH 5.2, and three volumes of ethanol were added to supematants. The tubes were mixed and incubated at −20 C for 1 hour. The HA was collected by centrifugation at 21,000×g for 10 min. The pellet was air dried and suspended in either water or PBS. The suspension was loaded to agarose gels along with High Molecular Weigh and KB ladder DNA standards from Gibco BRL. After electrophoresis was stopped, the gel was dried and exposed to a phosphoscreen for 1 hour to >2 weeks. The gel image was obtained from the screen using a Molecular Dynamics Phosphoimager. HA chain size was estimated by migration distance relative to DNA standards. HA product size distribution was estimated by integration over MW ranges of the integrated density value (IDV) curve obtained for each lane. The preferred HA product size (peak size) was designated by the MW range in which the greatest IDV was located.

[0194] Determination of seHAS protein concentration in membranes and normalization of seHAS activity. The recombinant seHAS protein in isolated membranes is a major component comprising ˜5-8% of the total protein, is well separated from other major proteins by SDS-PAGE and can be readily identified in Coomassie Blue-stained gels. E. coli membranes containing wild-type or mutant seHASs were solubilized and electrophoresed on 10% (w/v) gels following the procedure of Laemmli for SDS-PAGE. The amount of seHAS protein in each membrane preparation was quantitated by image analysis of the stained gel using a Fluorchem™8000 (Alpha Innotech Corp). The linearity of Coomassie Blue-stained seHAS bands was verified by loading different amounts of membrane protein. To generate a standard curve, various amounts of affinity purified seHAS-His₆ were subjected to identical SDS-PAGE and the Integrated Density Value (IDV) was determined for each band. The IDVs were plotted against pmol of pure seHAS. The IDV values for seHAS bands in membranes containing wild-type or mutant proteins were then compared with the standard to estimate the seHAS protein content per mg membrane protein. These data were then used to normalize the seHAS enzyme activity in the membrane preparations forwild-type and each variant seHAS.

[0195] Chemical modification of HAS in membranes. Stock solutions (10-100 mM) of NEM, IAA or other sulfhydryl reagents were made in PBS, pH 7.0. Suspensions of membranes containing seHAS or spHAS were incubated with 0-5 mM of the sulfhydryl reagent at 4° C. and the reactions were stopped by adding DTE to a final concentration of 10 mM. The membranes were then assayed for HAS activity as described above.

[0196] Labeling of seHAS with ¹⁴C-NEM. Isolated membranes from wild-type seHAS and each of the six double Cys-mutants of seHAS were incubated at 4° C. with 2.5 mM ¹⁴C-NEM (˜8×10⁶ dpm) for 5 min. The reactions were terminated by the addition of DTE to a final concentration of 5 mM. Total membrane proteins were precipitated by incubation with 10% trichloroacetic acid overnight at 4° C. and free ¹⁴C-NEM was then removed by two cycles of centrifugation and resuspension with 5% trichloroacetic acid. The precipitated proteins were dissolved in 1×SDS Laemmli sample buffer, neutralized by the addition of 0.1 N NaOH and analyzed by SDS-PAGE using a 10% gel. The Coomassie Blue-stained gel was scanned using a Model PDSIP60 densitometer (Molecular Dynamics), then treated with scintillants and subjected to fluorography using Biomax-MR (Kodak) film and an exposure of approximately one week. E. coli membranes prepared from cells transformed with vector alone, containing no seHAS, were included as a control.

[0197] MALDI-TOF analysis of seHAS derivatives. Wild-type seHAS-His₆ was bound to a Ni⁺²-nitrilotriacetic acid chelate resin (Qiagen), washed and treated with biotin-PEO-maleimide (10 mg/ml) for 2 h on ice. After washing the column, the enzyme was eluted with distilled water containing 0.5% (v/v) trifluoroacetic acid and 0.02% (w/v) dodecylmaltoside. The degree of modification of Cys residues in treated seHAS samples was determined using a MALDI-TOF Voyager Elite mass spectrometer (Applied Biosystems, Framingham, Mass.), which was equipped with a N₂ laser (337 nm), located in the NSF EPSCoR Oklahoma Laser Mass Spectrometry Facility. The sample (1 μl) was spotted to a sample plate, followed by matrix solution (1 μl) and allowed to air dry. The matrix used was a 20 mg/ml solution of 2,4,6-trihydroxyacetophenone in 50% acetonitrile containing 0.1% trifluoroacetic acid and 0.05% (w/v) dodecylmaltoside. Samples were analyzed in the linear, positive ion mode using a delayed extraction of 300 ns, a grid voltage of 87.8%, and were subject to a 25 kV accelerating voltage. External and internal calibrations were routinely performed using horse apomyoglobin and bovine serum albumin (16,951 and 66,430 Da, respectively). Spectra were an average of 80-120 scans and were processed using the 19 point Savitsky-Golay smoothing option included in the software provided by the manufacturer.

[0198] Determination of recombinant spHAS-H₆ content in membranes. Membranes were isolated from E. coli SURE strains expressing mutant or wildtype spHAS, fractionated by SDS-PAGE according to the procedure of Laemmli (1970) and the proteins were electrotransferred to nitrocellulose as described by Towbin et al. (1979) with minor modifications (Tlapak-Simmons, et al., 1998). Western analysis was performed by incubating these blots for 1 h at room temperature with a biotinylated anti-His₅ monoclonal antibody, as the primary antibody, then washing and incubating with 3 μg/ml ¹²⁵I-streptavidin, prepared as described hereinabove. After 1 h at room temperature, the blots were washed, dried and exposed to a Phosphoscreen for 1 to 72 h. The screens were analyzed using a Molecular Dynamics Phosphoimager and integrated density values were obtained for each spHAS band. Integrated density values were also obtained for increasing amounts of affinity-purified spHAS (Tlapak-Simmons et al., 1999a), which was used as an internal standard in the same blot to generate a standard curve. Dilutions of membrane samples were made as necessary to ensure that all estimates of HAS quantity were in the linear range of the assay. Those membrane samples giving a linear response with increasing protein were then compared to the standard curve to calculate the amount of spHAS present per μl membrane suspension. These values were then used to normalize the kinetic results obtained using membranes from the various spHAS mutants.

[0199] Enzymatic Analysis of HAS Mutants. E. coli SURE cells, previously transformed with plasmids containing wildtype or mutant spHAS genes, were grown to an A₆₀₀ of ˜1.2 and induced with 1 mM isopropyl thio-β-D-galactoside for three h. Cells were harvested and membranes were prepared as described previously (Tlapak-Simmons, et al., 1999a). The activities of mutant spHAS variants were assessed by measuring their Vₘₐₓ and Kₘ values in isolated membranes, normalized as described above for the amount of enzyme expressed. The Kₘ values were determined using a descending paper chromatography assay (Tlapak-Simmons, et al., 1999b), holding one UDP-sugar substrate constant and varying the other from 0.01 to 4 mM. Data were analyzed by linear regression using Haynes-Wolf plots for UDP-GlcUA or Hill plots for UDP-GlcNAc.

[0200] Inhibition of spHAS activity by NEM. Membrane preparations from wildtype and various spHAS mutants (i.e., C124,402A, C261,280A, C124,366,402A, C124,261,280,366,402A, and the Cys-null mutant) were incubated in 50 mM sodium, potassium phosphate, pH 7.0, 75 mM NaCl and 10% (v/v) glycerol with or without 20 mM NEM for 90 min on ice. The ability of the membrane samples to synthesize HA was then assessed by adding the following to the final concentrations indicated: 1 mM UDP-GlcUA, 1 mM UDP-GlcNAc, 0.68 μM UDP-[¹⁴C]GlcUA in 25 mM sodium/potassium phosphate, pH 7, 75 mM NaCl, 10 mM MgCl₂, 1 mM dithiothreitol, 0.1 mM EGTA, 15% glycerol. Reactions were shaken for 1 h at 30° C. in a Taitec E-36 micromixer, stopped by the addition of SDS to 2% (w/v), and spotted onto No. 3MM Whatman paper for descending paper chromatography overnight using 1 mM ammonium acetate pH 5.5/ethanol (7:13). [¹⁴C]GlcUA incorporation into high molecular weight HA was assessed by liquid scintillation spectroscopy to determine the radioactivity remaining at the origin. Confirmation that the latter material is authentic HA was obtained by showing its complete loss after treatment with streptomyces hyaluronidase.

[0201] Assessment ofDisulfide Bond Formation in spHAS by MALDI-TOF MS. Wildtype spHAS-His₆ was bound to a Ni⁺² chelate column (Qiagen) and washed as previously described (Tlapak-Simmons, et al,. 1999a). While still bound to the resin, the enzyme was incubated with biotin-PEO-maleimide (10 mg/ml) in the presence or absence of 6 M guanidinium-HCl for 2 h at 4° C. The column was washed and spHAS-His₆ was eluted with distilled water containing 0.5% (v/v) trifluroacetic acid and 0.02% (w/v) dodecylmaltoside. To assess the degree of modification of Cys residues, samples containing purified spHAS were analyzed by MALDI-TOF mass spectrometry using a Voyager Elite mass spectrometer (Applied Biosystems, Framingham, Mass.), which was equipped with a N₂ laser (337 nm), located in the NSF EPSCoR Oklahoma Laser Mass Spectrometry Facility. A 1 μl aliquot of sample was spotted to a sample plate followed by 1 μl of matrix and allowed to air dry. The matrix used was a saturated solution of 2,4,6-trihydroxyacetophenone in 50% acetonitrile containing 0.1% trifluoroacetic acid and 0.005% (w/v) dodecylmaltoside. Samples were analyzed in the linear, positive ion mode using a delayed extraction of 300 ns, a grid voltage of 87.8%, and were subject to a 25 kV accelerating voltage. External calibrations were performed routinely using horse apomyoglobin and bovine serum albumin (16,951 and 66,430 Da, respectively). Data were routinely processed using the 19 point Savitsky-Golay smoothing option included in the software provided by the manufacturer.

[0202] Construction of HAS's with multiple mutations. In order to produce the HAS enzymes with mutations in the ⁵¹LSF⁵³ region, primers were designed for use with the QuikChange II XL mutagenesis kit from Stratagene. As shown in Table XIX, these primers would allow for the conversion of each residue to either F, I, L, S, or T. Primers were also designed which would reproduce the mutations in the variants producing larger HA than wild-type seHAS, as well as give three additional possible mutations per site. The forward primer sequence and possible amino acid mutations for each site are listed in Table XIX.

[0203] Mutations were created in a seHAS gene contained on a plasmid used for integrating the HAS into the B. subtilis RB227 chromosomal DNA. The plasmid contains genes for resistance to both ampicillin (amp) and chloramphenicol (chlor), the latter of which is integrated into the B. subtilis chromosomal DNA along with the HAS. Mutagenesis was carried out according to the manufacturer's instructions, with a two minute per kilobase extension time. The mutated plasmid mixture was transformed into E. coli XL10-Gold competent cells from Stratagene, according to the manufacturers instructions. Isolated colonies from LBₐₘₚ agar plates were grown in LBₐₘₚ culture medium, and individual plasmids were obtained using the MiniPrep kit from Qiagen. At the Oklahoma Medical Research Foundation Sequencing Core Facility, sequencing was performed on the plasmids to determine the mutations present in the HAS prior to transformation and integration into the B. subtilis cells. Double, triple, and quadruple mutants were obtained by performing mutagenesis on one of the single, double, or triple mutants, respectively.

[0204] Plasmids containing the desired HAS mutant genes were linearized by digestion with the restriction enzyme PstI. Competent B. subtilis RB227 cells (150 μl aliquots) were incubated at 37° C. for one hour in a mixture of LB and Spizizen II media with 2 mM EGTA, 0.2 μg/ml chlor, and ˜0.4 μg of individual linearized plasmid DNA. The mixture was then plated on LB_{chlor} agar plates and individual colonies were propagated in LB_{chlor} media for glycerol stock production.

[0205] The B. subtilis cells expressing the various HAS genes were incubated for ˜16 hours at 37° C. in minimal media. The cells were then removed by centrifugation at 3,000×g for 20 minutes followed by filtration of the media through a 0.45 μm hydrophilic PVDF filter. The size of the HA present in the medium was determined by both agarose gel electrophoresis with visualization by Stains-All and by size-exclusion chromatography/multi-angle laser light scattering (SEC-MALLS) analysis. For each sample, 4 or 9 μl of clarified medium was mixed with 4 μl of 2×running dye or 1 μl of 10×running dye, respectively, and electrophoresed on 0.6% agarose gels in 1×TAE. Voltage was increased stepwise from 20 to 60 volts. Gels were then stained overnight with Stains-All and destained with water. SEC-MALLS analysis was employed to determine the absolute molecular masses of HA products. Polymers (˜5 μg mass; 200-μl injection) were separated on two PL Aquagel-OH 60 (15 μm) columns (7.5×300 mm, Polymer Laboratories, Amherst, Mass.) in tandem. The columns were eluted with 50 mM sodium phosphate, 150 mM NaCl, pH 7, at 0.5 ml/min. MALLS analysis of the eluant was performed by a DAWN DSP Laser Photometer in series with an OPTI-LAB DSP interferometric refractometer (632.8 nm; Wyatt Technology, Santa Barbara, Calif.). The ASTRA software package was used to determine the absolute average molecular mass using a dn/dc coefficient of 0.153 determined by Wyatt Technology.

TABLE XIX

Mutagenic Primer Sequences and Amino Acid
Substitutions
The sequences of the forward primers and
the possible amino acid substitutions are
listed.
The codons for the amino acids being
mutated are underlined in the primer
sequences.

SEQ

| | | |
|---|---|---|
| SeHAS | Possible AA | ID |

| | | | |
|---|---|---|---|
| AA | Forward Primers | substitutions | NO: |

| | | | |
|---|---|---|---|
| ⁵¹LSF⁵³ | CCTATTAGTCAAAATGTCCWYWWYWW | F, I, L, S, T | 181 |
| | YWTTTTACAAGCCATTTAAGGG | at each | |
| | | position | |
| K31 | CAATGTTTATCTCTTTGGTGCTWMCG | N, S, T, Y | 182 |
| | GAAGCTTGTCAATTTATGG | | |
| T268 | GGTGCTTGACCAACTATGCANTCGAT | F, I, L, V | 183 |
| | TTAGGAAAGACTGTTTATC | | |
| N317 | CTGTTAAGAAAATCATGAACANACCT | I, K, R, T | 184 |
| | TTTGTAGCCCTATGGACC | | |
| G344 | CTGTGGTGGATTTCTTTGTARASAAT | D, E, K, N | 185 |
| | GTCAGAGAATTTGATTG | | |
| F349 | CTTTGTAGGCAATGTCAGAGAAKRCG | C, D, G, Y | 186 |
| | ATTGGCTCAGGGTTTTAGC | | |

[0206] Thus it should be apparent that there has been provided in accordance with the present invention a recombinant host cell having a purified nucleic acid segment having a coding region encoding enzymatically active HAS introduced therein, as well as methods of producing hyaluronic acid from the recombinant host cell, that fully satisfies the objectives and advantages set forth above. Although the invention has been described in conjunction with specific embodiments thereof, it is evident that many alternatives, modifications, and variations will be apparent to those skilled in the art. Accordingly, it is intended to embrace all such alternatives, modifications, and variations that fall within the spirit and broad scope of the appended claims.

### REFERENCES

[0207] The following references, to the extent that they provide exemplary procedural or other details supplementary to those set forth herein, are specifically incorporated herein by reference in their entirety as though set forth herein particular.
[0208] 1. Abatangelo, G., and Weigel, P. H. (2000) (editors) New Frontiers in Medical Sciences:Redefining Hyaluronan. Elsevier Science B. V., Amsterdam.
[0209] 2. Appel, A., Horwitz, A. L., and Dorfman, A. (1979) J. Biol. Chem. 254, 12199-12203.
[0210] 3. Atkinson, E. M. and Long, S. R. (1992) Mol. Plant. Microbe. Interact. 5, 439-442.
[0211] 4. Baggenstoss, B. A. and Weigel, P. H. (2006) Anal. Biochem. 352, 243-251.
[0212] 5. Bliss, J. M. and Silver, R. P. (1996) Mol. Microbiol. 21, 221-231.
[0213] 6. Bradford, M. M. (1976) Anal. Biochem. 72, 248-254.
[0214] 7. Breton, C., and Imberty, A. (1999) Curr. Opin. Struct. Biol. 9, 563-571.
[0215] 8. Chakraborti, P. K., Garabedian, M. J., Yamamoto, K. R., and Simons, S. S., Jr. (1992) J. Biol. Chem. 267,11366-73.
[0216] 9. DeAngelis, P. L., Papaconstantinou, J. and Weigel, P. H. (1993a) J. Biol. Chem. 268,14568-14571.
[0217] 10. DeAngelis, P. L., Papaconstantinou, J. and Weigel, P. H. (1993b) J. Biol. Chem. 268,19181-2 19184.
[0218] 11. DeAngelis, P. L., Yang, N. and Weigel, P. H. (1994) Biochem. Biophys. Res. Commun. 199, 1-10.
[0219] 12. DeAngelis, P. L and Weigel, P. H. (1994) Biochem. 33, 9033-9039.
[0220] 13. DeAngelis, P. L. (1996) Biochem. 35, 9768-9771.
[0221] 14. DeAngelis, P. L. and Achyuthan, A. M. (1996) J. Biol. Chem. 271, 23657-23660.
[0222] 15. DeAngelis, P. L., Jing, W., Drake, R. R. and Achyuthan, A. M. (1998) J. Biol. Chem. 273,8454-8458.
[0223] 16. DeAngelis, P. L., Jing, W., Graves, M. V., Burbank, D. E. and Van Etten, J. L. (1997) Science, 278,1800-1803.
[0224] 17. DeAngelis, P. L. (1999) Cell. Mol. Life Sci. 56, 670-682.
[0225] 18. Determan, H. (1968) Gel Chromatography, Springer-Verlag, Inc. New York.
[0226] 19. Evered, D., and Whelan, J. (eds.) (1989) The biology of hyaluronan. Ciba Fnd. Symposium 143,1-288.
[0227] 20. Fenderson, B. A., Stamenkovic, I., and Aruffo, A. (1993) Differentiation 54, 85-98.
[0228] 21. Frillingos, S., Sahin-Toh, M., Wu, J. and Kaback, H. R. (1998) FASEB J. 12, 1281-1299.
[0229] 22. Heldermon, C. D., DeAngelis, P. L. and Weigel P. H. (2001) J. Biol. Chem. 276, 2037-2046.
[0230] 23. Heldermon, C. D., Tlapak-Simmons, V. L., Baggenstoss, B. A., and Weigel, P. H. (2001) Glycobiology, 11, 1017-1024.
[0231] 24. Hill, A. V. (1913) Biochem. J. 7, 471-480.
[0232] 25. Horton, M. R., Olman, M. A., Bao, C., White, K. E., Choi, A. M., Chin, B. Y., Noble, P. W., and Lowenstein, C. J. (2000) Am. J. Physiol. Lung Cell. Mol. Physiol. 279, 707-715.
[0233] 26. Itano, N. and Kimata, K. (1996a) J. Biol. Chem. 271, 9875-9878.
[0234] 27. Itano, N. and Kimata, K. (1996b) Biochem. Biophys. Res. Commun. 222, 816-820.
[0235] 28. Ishimoto, N., Temin, H. M., and Strominger, J. L. (1966) J. Biol. Chem. 241, 2052-2057.
[0236] 29. Itano, N., Sawai, T., Yoshida, M., Lenas, P., Yamada, Y., Imagawa, M., Shinomura, T., Hamaguchi, M., Yoshida, Y., Ohnuki, Y., Miyauchi, S., Spicer, A. P., McDonald, J. A., and Kimata, K. (1999) J. Biol. Chem. 274, 25085-25092.
[0237] 30. Ito, K., Sato, T., and Yura, T. (1977) Cell, 11, 551-559.
[0238] 31. Jung, K., Jung, H., and Kaback, H. R. (1994) Biochemistry 33, 3980-3985.
[0239] 32. Kass, E. H. and Seastone, C. V. (1944) J.Exp. Med. 79, 319-330.
[0240] 33. Kato, H., Tanaka, T., Nishioka, T., Kimura, A., and Oda, J. (1988) J. Biol. Chem. 263, 11646-11651.
[0241] 34. Knudson, C. B., and Knudson, W. (1993) FASEB J. 7,1233-1241.
[0242] 35. Kumari, K. and Weigel, P. H. (1997) J. Biol. Chem., 272, 32539-32546.
[0243] 36. Kumari, K., Tlapak-Simmons, V. L., Baggenstoss, B. A., and Weigel, P. H. (2002) J. Biol. Chem., 277, 13943-13951.
[0244] 37. Kumari, K., Baggenstoss, B. A., Parker, A. L., and Weigel, P. H. (2006) J. Biol. Chem., 281:11755-11760.
[0245] 38. Laemmli, U. K. (1970) Nature 227, 680-685.
[0246] 39. Lansing, M., Lellig, S., Mausolf, A., Martini, I., Crescenzi, F., O'Regan, M., and Prehm, P. (1993) Biochem. J. 289,179-184.
[0247] 40. Laurent, T. C., and Fraser, J. R. E. (1992) Hyaluronan. FASEB J. 6, 2397-2404.
[0248] 41. Lee, H. G. and Cowman, M. K. (1994) Anal. Biochem. 219, 278-287.
[0249] 42. Lin, Y., Mahan, K., Lathrop, W. F., Myles, D. G., and Primakoff, P. (1994) J. Cell Biol. 125, 1157-1163.
[0250] 43. Malinowski, N. M., Cysyk, R. L., and August, E. M. (1995) Biochem. and Molec. Biol. Intl. 35, 1123-1132.
[0251] 44. Markovitz, A., J. A. Cifonelli, and Dorfman A. (1959) J. Biol. Chem. 234, 2343-2350.
[0252] 45. McDonald, J. and Spicer, A. (1998). In Science of Hyaluronan Today (V. C. Hascall and M. Yanagishita, eds) chapter 7, www.GlycoForum.qr.ip.
[0253] 46. Meyer, M. F. and Kreil, G. (1996) Proc. Natl. Acad. Sci. USA 93, 4543-4547.
[0254] 47. Michaelis, L. and Menten, M. L. (1913) Biochem. Z. 49, 333-338.
[0255] 48. Moxon, E. R. and Kroll, J. S. (1990) Curr. Top. Microbiol. Immunol. 6, 65-85. Ng, K. F. and Schwartz, N. B. (1989) J. Biol. Chem. 264, 11776-11783.
[0256] 49. Ohno, S., Tanimoto, K., Fujimoto, K., Ijuin, C., Honda, K., Tanaka, N., Doi, T., Nakaharra, M., Tanne, K. (2001) Biochim Biophys Acta 1520, 71-78.
[0257] 50. Ohya, T. and Kaneko, Y. (1970) Biochim. Biophys. Acta 198, 607-609.
[0258] 51. Petrov, V. V., Pardo, J. P., and Slayman, C. W. (1997) J. Biol. Chem. 272, 1688-1693.
[0259] 52. Philipson, L. H., and Schwartz, N. B. (1984) J. Biol. Chem. 259, 5017-5023.
[0260] 53. Prehm, P. (1983) Biochem. J. 211, 181-189.
[0261] 54. Prehm, P. (1983) Biochem. J. 211, 191-198.
[0262] 55. Prehm, P. (1984). Biochem. J. 220: 597-600.
[0263] 56. Prehm, P. and Mausolf, A. 1986. Biochem. J. 235:887-889.
[0264] 57. Pummill, P. E. and DeAngelis, P. L. (2002) J. Biol.Chem., 277, 21610-21616.
[0265] 58. Pummill, P. E. and DeAngelis, P. L. (2003) J. Biol. Chem., 278,19808-19814.
[0266] 59. Pummill, P. E., Kempner, E. S., and DeAngelis, P. L. (2001) J. Biol. Chem., 276,39832-39835.
[0267] 60. Rosa, F., Sargent, T. D., Rebbert, M. L. Michaels, G. S., Jamrich, M., Grunz, H., Jonas, E., Winkles, J. A. and Dawid, I. B. (1988) Dev. Biol. 129,114-123.
[0268] 61. Shyjan, A. M., Heldin, P., Butcher, E. C., Yoshino, T. and Briskin, M. J. (1996) J. Biol. Chem. 271, 23395-23399.
[0269] 62. Spicer, A. P., Augustine, M. L. and McDonald, J. A. (1996) J. Biol. Chem. 271, 23400-23406.
[0270] 63. Spicer, A. P. and McDonald, J. A. (1998) J. Biol. Chem. 273, 1923-1932.
[0271] 64. Sugahara, K., Schwartz, B. N., and Dorfman, A. (1979) J. Biol. Chem. 254: 6252-6261.
[0272] 65. Tamura, N., Konishi, S., Iwaki, S., Kimura-Someya, T., Nada, S., Yamaguchi, A. (2001) J. Biol. Chem. 276, 20330-20339.
[0273] 66. Tlapak-Simmons V. L., Baggenstoss, B. A., Clyne, T. and Weigel, P. H. (1999a) J. Biol. Chem. 274, 42394245.
[0274] 67. Tlapak-Simmons V. L., Baggenstoss, B. A., Kumari, K., Heldermon, C., and Weigel, P. H. (1999b) J. Biol. Chem. 274, 4246-4253.
[0275] 68. Tlapak-Simmons, V. L., Kempner, E. S., Baggenstoss, B. A. and Weigel, P. H. (1998) J. Biol. Chem. 273, 26100-26109.
[0276] 69. Toole, B. P. (1997) J. Intem. Med. 242, 35-40.
[0277] 70. Towbin, H., Steahelin, T. and Gordon, J. (1979) Proc. Natl. Acad. Sci. U.S.A. 76, 4350-4354.
[0278] 71. Triscott, M. X. and van de Rijn, I. (1986) J. Biol. Chem. 261, 6004-6009.
[0279] 72. Usui, T., Suzuki K., Kaji, Y., Amano, S., Miyata, K., Heldin, P., Yamashita, H. (1999) Invest. Ophthalmol. Vis. Sci. 40, 563-7.
[0280] 73. van de Rijn, I. and Drake, R. R. (1992) J. Biol. Chem. 267, 24302-24306.
[0281] 74. Voss, J., Hubbell, W. L., Hemandez-Borrell, J. and Kaback, H. R. (1997) Biochemistry 36, 15061-15066.

[0282] Wang, Q. and Kaback, H. R. (1999) Biochemistry 38, 16777-16782.
[0283] 75. Ward, P. N., Field, T. R., Ditcham, W. G. Maguin, E. and Leigh, J. A. (2001) Infect. Immun. 69, 392-399.
[0284] 76. Watanabe, K. and Yamaguchi, Y. (1996) J. Biol. Chem. 271, 22945-22948.
[0285] 77. Weigel, P. H., Hascall, V. C. and Tammi, M. (1997) J. Biol. Chem. 272,13997-14000.
[0286] 78. Weigel, P. H. (1998). Bacterial hyaluronan synthases. In Science of Hyaluronan Today (V. C. Hascall and M. Yanagishita, eds) chapter 6, www.GlycoForum.gr.ip.
[0287] 79. Wessels, M. R., Goldberg, J. B., Moses, A. E., and Dicesare, T. J. (1994) Infect. Immun. 62, 433-441.
[0288] 80. Wessels, M. R., Moses, A. E., Goldberg, J. B., and Dicesare T. J. (1991) Proc. Natl. Acad. Sci. U.S.A. 88, 8317-8321.
[0289] 81. White, S. H. and Wimley, W. C. (1999) Annu. Rev. Biophys. Biomol. Struct. 28, 319-365.
[0290] 82. Whitnack, E., Bisno, A. L., and Beachey, E. H. (1981) Infect. Immun. 31, 985-991.
[0291] 83. Wolfgang, C. L., Zhang, Z-P., Gabriel, J. L., Pieringer, R. A., Soprano, K. J., and Soprano, D. R. (1997) J. Biol. Chem. 272, 746-753.
[0292] 84. Wu, J., and Kaback, R. H., (1994) Biochem. 33, 12166-12171.
[0293] 85. Yang, et al., (1994) EMBO J. 13:286-960.
[0294] 86. Yoshida, M., Itano, N., Yamada, Y. and Kimata, K. (2000) J. Biol. Chem. 275, 497-506.

The application's sequence listing, which the Patent Office published only in electronic form, follows.

SEQUENCE LISTING (186 sequences)

SEQ ID NO: 1 - DNA, 1254 bp, Streptococcus equisimilis
atgagaacattaaaaaacctcataactgttgtggcctttagtattttttgggtactgttgatttacgtcaatgtttatctctttggtgctaaaggaagcttgtcaatttatggctttttgctgatagcttacctattagtcaaaatgtccttatcctttttttacaagccatttaagggaagggctgggcaatataaggttgcagccattattccctcttataacgaagatgctgagtcattgctagagaccttaaaaagtgttcagcagcaaacctatcccctagcagaaatttatgttgttgacgatggaagtgctgatgagacaggtattaagcgcattgaagactatgtgcgtgacactggtgacctatcaagcaatgtcattgttcatcggtcagagaaaaatcaaggaaagcgtcatgcacaggcctgggcctttgaaagatcagacgctgatgtctttttgaccgttgactcagatacttatatctaccctgatgctttagaggagttgttaaaaacctttaatgacccaactgtttttgctgcgacgggtcaccttaatgtcagaaatagacaaaccaatctcttaacacgcttgacagatattcgctatgataatgcttttggcgttgaacgagctgcccaatccgttacaggtaatatccttgtttgctcaggtccgcttagcgtttacagacgcgaggtggttgttcctaacatagatagatacatcaaccagaccttcctgggtattcctgtaagtattggtgatgacaggtgcttgaccaactatgcaactgatttaggaaagactgtttatcaatccactgctaaatgtattacagatgttcctgacaagatgtctacttacttgaagcagcaaaaccgctggaacaagtccttctttagagagtccattatttctgttaagaaaatcatgaacaatccttttgtagccctatggaccatacttgaggtgtctatgtttatgatgcttgtttattctgtggtggatttctttgtaggcaatgtcagagaatttgattggctcagggttttagcctttctggtgattatcttcattgttgccctgtgtcggaacattcattacatgcttaagcacccgctgtccttcttgttatctccgttttatggggtgctgcatttgtttgtcctacagcccttgaaattatattctctttttactattagaaatgctgactggggaacacgtaaaaaattattataa

SEQ ID NO: 2 - protein, 417 aa, Streptococcus equisimilis
MRTLKNLITVVAFSIFWVLLIYVNVYLFGAKGSLSIYGFLLIAYLLVKMSLSFFYKPFKGRAGQYKVAAIIPSYNEDAESLLETLKSVQQQTYPLAEIYVVDDGSADETGIKRIEDYVRDTGDLSSNVIVHRSEKNQGKRHAQAWAFERSDADVFLTVDSDTYIYPDALEELLKTFNDPTVFAATGHLNVRNRQTNLLTRLTDIRYDNAFGVERAAQSVTGNILVCSGPLSVYRREVVVPNIDRYINQTFLGIPVSIGDDRCLTNYATDLGKTVYQSTAKCITDVPDKMSTYLKQQNRWNKSFFRESIISVKKIMNNPFVALWTILEVSMFMMLVYSVVDFFVGNVREFDWLRVLAFLVIIFIVALCRNIHYMLKHPLSFLLSPFYGVLHLFVLQPLKLYSLFTIRNADWGTRKKLL

SEQ ID NO: 3 - DNA, 1440 bp, Streptococcus pyogenes
tttaatggaaacacaattttattaaaaatatctctatatctagttgacattatttcttatttatattataatattgaggtcctttctttcaaggaaattaaaaaagaaagaggtgtaattgtgcctatttttaaaaaaactttaattgttttatcctttatttttttgatatctatcttgatttatctaaatatgtatctatttggaacatcaactgtaggaatttatggagtaatattaataacctatctagttatcaaacttggattatctttcctttatgagccatttaaaggaaatccacatgactataaagttgctgctgtaattccttcttataatgaagatgccgagtcattattagaaacacttaaaagtgtgttagcacagacctatccgttatcagaaatttatattgttgatgatgggagttcaaacacagatgcaatacaattaattgaagagtatgtaaatagagaagtggatatttgtcgaaacgttatcgttcaccgttcccttgtcaataaaggaaaacgccatgctcaagcgtgggcatttgaaagatctgacgctgacgtttttttaaccgtagactcagatacttatatctatccaaatgccttagaagaactcctaaaaagcttcaatgatgagacagtttatgctgcaacaggacatttgaatgctagaaacagacaaactaatctattaacgcgacttacagatatccgttacgataatgcctttggggtggagcgtgctgctcaatcattaacaggtaatattttagtttgctcaggaccattgagtatttatcgacgtgaagtgattattcctaacttagagcgctataaaaatcaaacattcctaggtttacctgttagcattggggatgatcgatgtttaacaaattatgctattgatttaggacgcactgtctaccaatcaacagctagatgtgatactgatgtacctttccaattaaaaagttatttaaagcaacaaaatcgatggaataaatctttttttagagaatctattatttctgttaaaaaaattctttctaatcccatcgttgccttatggactattttcgaagtcgttatgtttatgatgttgattgtcgcaattgggaatcttttgtttaatcaagctattcaattagaccttattaaactttttgcctttttatccatcatctttatcgttgctttatgtcgtaatgttcattatatggtcaaacatcctgctagttttttgttatctcctctgtatggaatattacacttgtttgtcttacagcccctaaaactttattctttatgcaccattaaaaatacggaatggggaacacgtaaaaaggtcactatttttaaataatatatgcatcgagtagttagagaaggagtaattttatgaaaatagcagttgctggatcag

SEQ ID NO: 4 - protein, 419 aa, Streptococcus pyogenes
MPIFKKTLIVLSFIFLISILIYLNMYLFGTSTVGIYGVILITYLVIKLGLSFLYEPFKGNPHDYKVAAVIPSYNEDAESLLETLKSVLAQTYPLSEIYIVDDGSSNTDAIQLIEEYVNREVDICRNVIVHRSLVNKGKRHAQAWAFERSDADVFLTVDSDTYIYPNALEELLKSFNDETVYAATGHLNARNRQTNLLTRLTDIRYDNAFGVERAAQSLTGNILVCSGPLSIYRREVIIPNLERYKNQTFLGLPVSIGDDRCLTNYAIDLGRTVYQSTARCDTDVPFQLKSYLKQQNRWNKSFFRESIISVKKILSNPIVALWTIFEVVMFMMLIVAIGNLLFNQAIQLDLIKLFAFLSIIFIVALCRNVHYMVKHPASFLLSPLYGILHLFVLQPLKLYSLCTIKNTEWGTRKKVTIFK

SEQ ID NO: 5 - DNA, 3466 bp, Streptococcus uberis
gcaaaagtttaaaggaggaattatggaaaaactaaaaaatctcattacatttatgacttttattttcctgtggctcataattattgggcttaatgtttttgtatttggaactaaaggaagtctaacagtgtatgggattattctattaacctatttgtcgataaaaatgggattatcttttttttatcgtccctataaaggaagtgtaggtcaatataaggtagcagctattatcccatcttataatgaggatggtgtcggtttactagaaactctaaagagtgttcaaaaacaaacatatccaattgcagaaattttcgtaattgacgatgggtcagtagataaaacaggtataaaattggtcgaagactatgtgaagttaaatggctttggagaccaagttatcgttcatcagatgcctgaaaatgttggtaaaagacatgctcaggcttgggcatttgaaaggtctgatgctgatgttttcttaacagtggattcagatacctacatctatcctgatgctcttgaagaattattaaagacatttaatgatccagaggtctacgctgcaactggtcatttaaatgcaagaaatagacaaactaatctcttaactagactgactgatattcgttacgataatgcatttggtgtagaacgtgctgctcagtctgttacgggaaatattttggtttgttccggacctttaagtatttatagacgttccgtcggtattccaaatcttgaacgctatacctcacaaacatttcttggtgtccctgtaagcataggggatgaccgttgtttgacaaattatgcaactgatttgggaaaaacggtttatcagtcaactgcaagatgtgatactgacgttccagataagtttaaggttttcatcaaacaacaaaatcgttggaataagtcattttttagggagtctattatctctgttaagaagttattagccacaccaagtgttgctgtttggactattacagaagtttccatgttcatcatgctagtttattctatctttagcttattgataggagaggctcaagaatttaatctcataaaactggttgcttttttagttattattttcatagtagctctttgtagaaatgttcattacatggttaagcatccatttgcttttttattgtcaccgttttatggattgatacatctattcgttttgcaacctcttaagatatattcgttatttactataagaaatgctacatggggaactcgtaaaaagacaagtaaataattcaattagagaaaggacaaaatagtgaaaattgcagttgcaggttctggctatgttggcctatcattaagtgtattattagcacagaaaaatcctgttacagttgtagatattattgagaagaaagtaaatctcataaatcaaaaacaatcaccaatccaggatgttgatattgaaaactatttaaaagaaaaaaagttacaattaagagctactctagacgccgatcaagcatttagggatgcagatatactaattattgctacaccaaccaattatgatgtggagaagaatttttttgatactagtcatgttgagactgtaattgagaaagctttagctttaaatagtcaggctttgttagttattaaatcaacgataccacttggttttattaaaaagatgcgtcaaaaatatcagacagaccgtattatttttagtcccgaatttcttagagagtctaaagctttaaaagataatctttatcctagtcgaataattgtttcctttgaagatgatgattctatggaagtaatagaagcagcaaagacttttgctcaattgttaaaagatggttctttggataaagatgttcctgtactttttatgggttcagcagaggctgaagcagtaaaattatttgccaatacctatttagctatgcgtgtctcctattttaatgagttagatacatatgctgaaaagaatggtttacgtgtggataatattattgagggcgtttgccatgatcgacgcataggaattcattataataacccttcttttggctatggaggatactgcttacctaaagataccaaacagttgctagcaggctatgatggtattcctcaatcgcttataaaagcaattgttgattctaataaaattcgtaaagagtatatcgcatcacaaattttacaacaattgagtgatattaatgtagatcctaaagatgcaacgattggtatttaccgccttatcatgaaaagtaactctgataatttcagagagagtgcaataaaagatattattgatcatattaagagctatcaaattaatatagtcttgtatgagccaatgatgaatgaagattttgatttaccaatcattgatgatttatctgacttcaaagccatgtcacatattatcgtttcaaatagatatgatttagccttagaagatgttaaagaaaaagtttacaccagagatatttacggtgtggattaagtttgatttttaacaaatctccaaaaaatagataaaaaaaacagactctgataaaagagtctgttttttaaaagtgtgagcatcctattgctaggatgctcaggaaatttatgaaaagggagataagagggaacttatcttccccaacggtttgggagaccattatttaggatagtcttatcataagctatcaaccttaaagatttcttaactcgttttcgtttgggtcttgtctttttaattttttgatgagaattaaacttgatggaatgagaatcaggacactgcctatccaggctgctggattagctgaagccacaccaacaaaaccaaagtataacaggccaataatggcgactcctgctctcatgactaattccataatgccagctaaagtaggaacaaaaccgtatccgagaccttgaatgaaacttcttagtataaataggatggctaaaatccaataaagagagccattaatcagataatagagataggctaaatggaaaacagctggatcagccttactaatgaaaatgccagagaaaaagcggtgttggaaaattaacagaatagcaaaaagaacagaccaaataatacagataatgagtgaatctttaagaccctcaaggattcttttataagctttagcgccatagttctgagctgtaaaggttgacaaggctaagcccagatttaacatcggtagcatggccagttggtctgttttactggcaatagcaatagctgcgatagcttcggtccccaacttattaatggttacctgcagtgtaatggctccaatggctataatactagcctgaaatgccatgggaaaaccaaggcgagcatgatttctgagattttccctatcaagagtcaaatcgtctttcttcagtcggaaatgggggatctttttgttgatgtaaaggaccaaatagagtacggagaaagcttgca

SEQ ID NO: 6 - protein, 417 aa, Streptococcus uberis
MEKLKNLITFMTFIFLWLIIIGLNVFVFGTKGSLTVYGIILLTYLSIKMGLSFFYRPYKGSVGQYKVAAIIPSYNEDGVGLLETLKSVQKQTYPIAEIFVIDDGSVDKTGIKLVEDYVKLNGFGDQVIVHQMPENVGKRHAQAWAFERSDADVFLTVDSDTYIYPDALEELLKTFNDPEVYAATGHLNARNRQTNLLTRLTDIRYDNAFGVERAAQSVTGNILVCSGPLSIYRRSVGIPNLERYTSQTFLGVPVSIGDDRCLTNYATDLGKTVYQSTARCDTDVPDKFKVFIKQQNRWNKSFFRESIISVKKLLATPSVAVWTITEVSMFIMLVYSIFSLLIGEAQEFNLIKLVAFLVIIFIVALCRNVHYMVKHPFAFLLSPFYGLIHLFVLQPLKIYSLFTIRNATWGTRKKTSK

SEQ ID NO: 7 - DNA, 2937 bp, Pasteurella multocida
attttttaaggacagaaaatgaatacattatcacaagcaataaaagcatataacagcaatgactatcaattagcactcaaattatttgaaaagtcggcggaaatctatggacggaaaattgttgaatttcaaattaccaaatgccaagaaaaactctcagcacatccttctgttaattcagcacatctttctgtaaataaagaagaaaaagtcaatgtttgcgatagtccgttagatattgcaacacaactgttactttccaacgtaaaaaaattagtactttctgactcggaaaaaaacacgttaaaaaataaatggaaattgctcactgagaagaaatctgaaaatgcggaggtaagagcggtcgcccttgtaccaaaagattttcccaaagatctggttttagcgcctttacctgatcatgttaatgattttacatggtacaaaaagcgaaagaaaagacttggcataaaacctgaacatcaacatgttggtctttctattatcgttacaacattcaatcgaccagcaattttatcgattacattagcctgtttagtaaaccaaaaaacacattacccgtttgaagttatcgtgacagatgatggtagtcaggaagatctatcaccgatcattcgccaatatgaaaataaattggatattcgctacgtcagacaaaaagataacggttttcaagccagtgccgctcggaatatgggattacgcttagcaaaatatgactttattggcttactcgactgtgatatggcgccaaatccattatgggttcattcttatgttgcagagctattagaagatgatgatttaacaatcattggtccaagaaaatacatcgatacacaacatattgacccaaaagacttcttaaataacgcgagtttgcttgaatcattaccagaagtgaaaaccaataatagtgttgccgcaaaaggggaaggaacagtttctctggattggcgcttagaacaattcgaaaaaacagaaaatctccgcttatccgattcgcctttccgtttttttgcggcgggtaatgttgctttcgctaaaaaatggctaaataaatccggtttctttgatgaggaatttaatcactggggtggagaagatgtggaatttggatatcgcttattccgttacggtagtttctttaaaactattgatggcattatggcctaccatcaagagccaccaggtaaagaaaatgaaaccgatcgtgaagcgggaaaaaatattacgctcgatattatgagagaaaaggtcccttatatctatagaaaacttttaccaatagaagattcgcatatcaatagagtacctttagtttcaatttatatcccagcttataactgtgcaaactatattcaacgttgcgtagatagtgcactgaatcagactgttgttgatctcgaggtttgtatttgtaacgatggttcaacagataataccttagaagtgatcaataagctttatggtaataatcctagggtacgcatcatgtctaaaccaaatggcggaatagcctcagcatcaaatgcagccgtttcttttgctaaaggttattacattgggcagttagattcagatgattatcttgagcctgatgcagttgaactgtgtttaaaagaatttttaaaagataaaacgctagcttgtgtttataccactaatagaaacgtcaatccggatggtagcttaatcgctaatggttacaattggccagaattttcacgagaaaaactcacaacggctatgattgctcaccactttagaatgttcacgattagagcttggcatttaactgatggattcaatgaaaaaattgaaaatgccgtagactatgacatgttcctcaaactcagtgaagttggaaaatttaaacatcttaataaaatctgctataaccgtgtattacatggtgataacacatcaattaagaaacttggcattcaaaagaaaaaccattttgttgtagtcaatcagtcattaaatagacaaggcataacttattataattatgacgaatttgatgatttagatgaaagtagaaagtatattttcaataaaaccgctgaatatcaagaagagattgatatcttaaaagatattaaaatcatccagaataaagatgccaaaatcgcagtcagtattttttatcccaatacattaaacggcttagtgaaaaaactaaacaatattattgaatataataaaaatatattcgttattgttctacatgttgataagaatcatcttacaccagatatcaaaaaagaaatactagccttctatcataaacatcaagtgaatattttactaaataatgatatctcatattacacgagtaatagattaataaaaactgaggcgcatttaagtaatattaataaattaagtcagttaaatctaaattgtgaatacatcatttttgataatcatgacagcctattcgttaaaaatgacagctatgcttatatgaaaaaatatgatgtcggcatgaatttctcagcattaacacatgattggatcgagaaaatcaatgcgcatccaccatttaaaaagctcattaaaacttattttaatgacaatgacttaaaaagtatgaatgtgaaaggggcatcacaaggtatgtttatgacgtatgcgctagcgcatgagcttctgacgattattaaagaagtcatcacatcttgccagtcaattgatagtgtgccagaatataacactgaggatatttggttccaatttgcacttttaatcttagaaaagaaaaccggccatgtatttaataaaacatcgaccctgacttatatgccttgggaacgaaaattacaatggacaaatgaacaaattgaaagtgcaaaaagaggagaaaatatacctgttaacaagttcattattaatagtataactctataa

SEQ ID NO: 8 - protein, 972 aa, Pasteurella multocida
MNTLSQAIKAYNSNDYQLALKLFEKSAEIYGRKIVEFQITKCQEKLSAHPSVNSAHLSVNKEEKVNVCDSPLDIATQLLLSNVKKLVLSDSEKNTLKNKWKLLTEKKSENAEVRAVALVPKDFPKDLVLAPLPDHVNDFTWYKKRKKRLGIKPEHQHVGLSIIVTTFNRPAILSITLACLVNQKTHYPFEVIVTDDGSQEDLSPIIRQYENKLDIRYVRQKDNGFQASAARNMGLRLAKYDFIGLLDCDMAPNPLWVHSYVAELLEDDDLTIIGPRKYIDTQHIDPKDFLNNASLLESLPEVKTNNSVAAKGEGTVSLDWRLEQFEKTENLRLSDSPFRFFAAGNVAFAKKWLNKSGFFDEEFNHWGGEDVEFGYRLFRYGSFFKTIDGIMAYHQEPPGKENETDREAGKNITLDIMREKVPYIYRKLLPIEDSHINRVPLVSIYIPAYNCANYIQRCVDSALNQTVVDLEVCICNDGSTDNTLEVINKLYGNNPRVRIMSKPNGGIASASNAAVSFAKGYYIGQLDSDDYLEPDAVELCLKEFLKDKTLACVYTTNRNVNPDGSLIANGYNWPEFSREKLTTAMIAHHFRMFTIRAWHLTDGFNEKIENAVDYDMFLKLSEVGKFKHLNKICYNRVLHGDNTSIKKLGIQKKNHFVVVNQSLNRQGITYYNYDEFDDLDESRKYIFNKTAEYQEEIDILKDIKIIQNKDAKIAVSIFYPNTLNGLVKKLNNIIEYNKNIFVIVLHVDKNHLTPDIKKEILAFYHKHQVNILLNNDISYYTSNRLIKTEAHLSNINKLSQLNLNCEYIIFDNHDSLFVKNDSYAYMKKYDVGMNFSALTHDWIEKINAHPPFKKLIKTYFNDNDLKSMNVKGASQGMFMTYALAHELLTIIKEVITSCQSIDSVPEYNTEDIWFQFALLILEKKTGHVFNKTSTLTYMPWERKLQWTNEQIESAKRGENIPVNKFIINSITL

SEQ ID NO: 9 - DNA, 1767 bp, Xenopus laevis
atgaaggaaaaagctgcagaaacaatggagattcctgaagggatccccaaagatctagagccaaaacaccccaccctttggaggataatttattattcttttggtgtggtgctattagctaccattacagcagcctatgtggcagagttccaggtcctcaaacatgaagccattctcttctcccttgggctttatggtcttgcaatgcttctccacctgatgatgcagagcctctttgccttcctggagatacgcagggtaaataagagtgagcttccttgcagctttaagaagacagtggctctgaccattgctgggtatcaggagaaccctgagtacctgataaagtgcttggaatcctgcaagtatgtgaaataccccaaagataaactcaagatcattttggtcatcgatgggaacacagaggatgatgcctacatgatggagatgttcaaagacgtgttccacggtgaagatgtaggcacctacgtatggaagggaaattaccacactgttaaaaagcctgaggagaccaataagggatcctgtcctgaggtttctaagcccttgaatgaagatgaaggtatcaatatggtggaagaacttgttagaaacaagagatgtgtgtgcatcatgcaacagtggggcggaaaaagagaggtcatgtacacagcattccaggccattgggacttctgtggactatgtacaggtctgtgactcggacaccaaactggatgaactggcaacagtggaaatggtgaaggttctggaatccaatgacatgtacggcgcagtgggaggagacgttcgcattctgaacccttatgattccttcattagtttcatgagcagcctgcgttactggatggcgtttaacgtggagagggcctgccagtcttacttcgactgcgtgtcctgtataagtggacctctgggaatgtaccggaacaacattctccaggtgtttttggaagcctggtacagacagaaatttttgggaacctattgtactttgggagatgatagacatctgacaaaccgagtgctcagcatgggatatcgcaccaaatacacccacaaatccagagcattctccgaaactccatccctgtatctccggtggttgaaccagcaaacccggtggaccaagtcctacttccgagagtggctgtataatgcccagtggtggcacaagcatcacatctggatgacctatgagtctgtggtgtccttcatctttcccttcttcatcactgccactgttatccgcctcatctatgccggcaccatatggaatgttgtgtggctcctcctgtgcatccagatcatgtctctcttcaaatccatctatgcctgctggctccgcggcaacttcattatgctcctgatgtctctctactccatgctgtacatgactgggcttctgccatccaagtactttgccttgttgaccttaaacaagaccggttggggaacatctgggcgcaagaagatagtaggcaactacatgccaatactgcccctgtccatatgggcagctgttctgtgtggaggggtgggttatagtatctatatggactgtcaaaatgactggagcacccctgaaaagcaaaaggagatgtaccatctattgtatgggtgtgtgggctatgtaatgtactgggtaatcatggctgtgatgtactgggtctgggtgaagaggtgctgcaggaagaggtcccaaactgtcaccctggtccatgacattcctgatatgtgtgtttaa

SEQ ID NO: 10 - protein, 588 aa, Xenopus laevis
MKEKAAETMEIPEGIPKDLEPKHPTLWRIIYYSFGVVLLATITAAYVAEFQVLKHEAILFSLGLYGLAMLLHLMMQSLFAFLEIRRVNKSELPCSFKKTVALTIAGYQENPEYLIKCLESCKYVKYPKDKLKIILVIDGNTEDDAYMMEMFKDVFHGEDVGTYVWKGNYHTVKKPEETNKGSCPEVSKPLNEDEGINMVEELVRNKRCVCIMQQWGGKREVMYTAFQAIGTSVDYVQVCDSDTKLDELATVEMVKVLESNDMYGAVGGDVRILNPYDSFISFMSSLRYWMAFNVERACQSYFDCVSCISGPLGMYRNNILQVFLEAWYRQKFLGTYCTLGDDRHLTNRVLSMGYRTKYTHKSRAFSETPSLYLRWLNQQTRWTKSYFREWLYNAQWWHKHHIWMTYESVVSFIFPFFITATVIRLIYAGTIWNVVWLLLCIQIMSLFKSIYACWLRGNFIMLLMSLYSMLYMTGLLPSKYFALLTLNKTGWGTSGRKKIVGNYMPILPLSIWAAVLCGGVGYSIYMDCQNDWSTPEKQKEMYHLLYGCVGYVMYWVIMAVMYWVWVKRCCRKRSQTVTLVHDIPDMCV

SEQ ID NO: 11 - DNA, 1740 bp, Chlorella virus PBCV-1
aagacttcttgaaagttacaatgggtaaaaatataatcataatggtttcgtggtacaccatcataacttcaaatctaatcgcggttggaggagcctctctaatcttggctccggcaattactgggtatgttctacattggaatattgctctctcgacaatctggggagtatcagcttatggtattttcgtttttgggtttttccttgcacaagttttattttcagaactgaacaggaaacgtcttcgcaagtggatttctctcagacctaagggttggaatgatgttcgtttggctgtgatcattgctggatatcgcgaggatccttatatgttccagaagtgcctcgagtctgtacgtgactctgattatggcaacgttgcccgtctgatttgtgtgattgacggtgatgaggacgatgatatgaggatggctgccgtttacaaggcgatctacaatgataatatcaagaagcccgagtttgttctgtgtgagtcagacgacaaggaaggtgaacgcatcgactctgatttctctcgcgacatttgtgtcctccagcctcatcgtggaaaacgggagtgtctttatactgggtttcaacttgcaaagatggaccccagtgtcaatgctgtcgttctgattgacagcgataccgttctcgagaaggatgctattctggaagttgtatacccacttgcatgcgatcccgagatccaagccgttgcaggtgagtgtaagatttggaacacagacactcttttgagtcttctcgtcgcttggcggtactattctgcgttttgtgtggagaggagtgcccagtcttttttcaggactgttcagtgcgttggggggccactgggtgcctacaagattgatatcattaaggagattaaggacccctggatttcccagcgctttcttggtcagaagtgtacttacggtgacgaccgccggctaaccaacgagatcttgatgcgtggtaaaaaggttgtgttcactccatttgctgttggttggtctgacagtccgaccaatgtgtttcggtacatcgttcagcagacccgctggagtaagtcgtggtgccgcgaaatttggtacaccctcttcgccgcgtggaagcacggtttgtctggaatttggctggcctttgaatgtttgtatcaaattacatacttcttcctcgtgatttacctcttttctcgcctagccgttgaggccgaccctcgcgcccagacagccacggtgattgtgagcaccacggttgcattgattaagtgtgggtatttttcattccgagccaaggatattcgggcgttttactttgtgctttatacatttgtttactttttctgtatgattccggccaggattactgcaatgatgacgctttgggacattggctgggatactcgcggtggaaacgagaagccttccgttggcacccgggtcgctctgtgggcaaagcaatatctcattgcatatatgtggtgggccgcggttgttggcgctggagtttacagcatcgtccataactggatgttcgattggaattctctttcttatcgttttgctttggttggtatttgttcttacattgtttttattgttattgtgctggtggtttatttcaccggcaaaattacgacttggaatttcacgaagcttcagaaggagctaatcgaggatcgcgttctgtacgatgcaactaccaatgctcagtctgtgtgatttttcctgcaag

SEQ ID NO: 12 - protein, 567 aa, Chlorella virus PBCV-1
MGKNIIIMVSWYTIITSNLIAVGGASLILAPAITGYVLHWNIALSTIWGVSAYGIFVFGFFLAQVLFSELNRKRLRKWISLRPKGWNDVRLAVIIAGYREDPYMFQKCLESVRDSDYGNVARLICVIDGDEDDDMRMAAVYKAIYNDNIKKPEFVLCESDDKEGERIDSDFSRDICVLQPHRGKRECLYTGFQLAKMDPSVNAVVLIDSDTVLEKDAILEVVYPLACDPEIQAVAGECKIWNTDTLLSLLVAWRYYSAFCVERSAQSFFRTVQCVGGPLGAYKDIIKEIKDPWISQRFLGQKCTYGDDRRLTNEILMRGKKVVFTPFAVGWSDSPTNVFRYIVQQTRWSKSWCREIWYTLFAAWKHGLSGIWLAFECLYQITYFFLVIYLFSRLAVEADPRAQTATVIVSTTVALIKCGYFSFRAKDIRAFYFVLYTFVYFFCMIPARITAMMTLWDIGWDTRGGNEKPSVGTRVALWAKQYLIAYMWWAAVVGAGVYSIVHNWMFDWNSLSYRFALVGICSYIVFIVIVLVVYFTGKITTWNFTKLQKELIEDRVLYDATTNAQSV

SEQ ID NO: 13 - DNA, 1380 bp, Sulfolobus solfataricus
tgccctcatgcggttaagcttgaaatggccttttttagaaagagaaaggagttatctagttaaccaatcttgccaccagaaagttatcatagcatatagggaagcaatatattgcactgctagtgcgatagaaccgtatattagagttttcaatttatcttctggaattaaataaatcatggtcattacaaagggtattatagctataaatcctccgtaatgcaagaataaataaaagataaagaagtcggaatggtaacgggttggcagatacaatagtaataagagcttagtattaattacattaattgaggaatagatcttaagaattctagtgaaactcatataaaggaacaagagcgtaaataatggtaacagattggtgtatatcatattaaaaacgtataatgaaccccttttacttatactaccgtcagctatctcccttataaaattaagataatttgctcttgtccatctagttacttgtttcgtaaacatttttatgtctctagggggttttgtatatgccactgcatcaaagacttttacagccctataccctttttttataacaaaatcggttaaatctctatcatcggaaattttaattggtcttccaaacattttcggctctaaaaactctttagataatatatatggttttacgagttcggtcctatatattacacattgtccacttaatattatagcacttccaaaatagtttaccgccctgtttactatctcacttattctctcaaagaattcaccataataatatgcatatttatttttctcgtcatacataattctaatatttggccctactccacctactgactcatcaaaaacacttaacatctttagtatagagtctttataaataatcgtatcactatctagaaacatcactagaggagatcttacatacttaactccctcggctaacgcgtatcttttccccttatgttcacgcatataaataaatttaccaccatatctttccgtaattgatttgtatggttctagaacactatcccctacaacaataaattctaaccttgtgtcatataaagtccttatcactttttcaaaaatatctatttcctccttataaactggtatcacaactgtaagatcagagagattataaaaacttgagtgttgagtttttctattattacttattactgcaaaaaatgaattcaaaaagaaataaagaatagttataattgtgaatgaaagagaataaatgaaatatgagactccgtgaaataagtgaaacataatcaccactataatgctcgatatcgaaatatataacgatttttcctaattcaccattcgaattctccgttcaaaaaggggttagttaac

SEQ ID NO: 14 - protein, 415 aa, Sulfolobus solfataricus
MVIMFHLFHGVSYFIYSLSFTIITILYFFLNSFFAVISNNRKTQHSSFYNLSDLTVVIPVYKEEIDIFEKVIRTLYDTRLEFIVVGDSVLEPYKSITERYGGKFIYMREHKGKRYALAEGVKYVRSPLVMFLDSDTIIYKDSILKMLSVFDESVGGVGPNIRIMYDEKNKYAYYYGEFFERISEIVNRAVNYFGSAIILSGQCVIYRTELVKPYILSKEFLEPKMFGRPIKISDDRDLTDFVIKKGYRAVKVFDAVAYTKPPRDIKMFTKQVTRWTRANYLNFIREIADGSISKRGSLYVFNMIYTNLLPLFTLLFLYMSFTRILKIYSSINVINTKLLLLLYLPTRYHSDFFIFYLFLHYGGFIAIIPFVMTMIYLIPEDKLKTLIYGSIALAVQYIASLYAMITFWWQDWLTR

SEQ ID NO: 15 - protein, 417 aa, Streptococcus equisimilis
  MISC_FEATURE (226)..(226): Xaa = Ala, Ser, or any other amino acid
MRTLKNLITVVAFSIFWVLLIYVNVYLFGAKGSLSIYGFLLIAYLLVKMSLSFFYKPFKGRAGQYKVAAIIPSYNEDAESLLETLKSVQQQTYPLAEIYVVDDGSADETGIKRIEDYVRDTGDLSSNVIVHRSEKNQGKRHAQAWAFERSDADVFLTVDSDTYIYPDALEELLKTFNDPTVFAATGHLNVRNRQTNLLTRLTDIRYDNAFGVERAAQSVTGNILVXSGPLSVYRREVVVPNIDRYINQTFLGIPVSIGDDRCLTNYATDLGKTVYQSTAKCITDVPDKMSTYLKQQNRWNKSFFRESIISVKKIMNNPFVALWTILEVSMFMMLVYSVVDFFVGNVREFDWLRVLAFLVIIFIVALCRNIHYMLKHPLSFLLSPFYGVLHLFVLQPLKLYSLFTIRNADWGTRKKLL

SEQ ID NO: 16 - protein, 417 aa, Streptococcus equisimilis
  MISC_FEATURE (262)..(262): Xaa = Ala, Ser or any other amino acid
MRTLKNLITVVAFSIFWVLLIYVNVYLFGAKGSLSIYGFLLIAYLLVKMSLSFFYKPFKGRAGQYKVAAIIPSYNEDAESLLETLKSVQQQTYPLAEIYVVDDGSADETGIKRIEDYVRDTGDLSSNVIVHRSEKNQGKRHAQAWAFERSDADVFLTVDSDTYIYPDALEELLKTFNDPTVFAATGHLNVRNRQTNLLTRLTDIRYDNAFGVERAAQSVTGNILVCSGPLSVYRREVVVPNIDRYINQTFLGIPVSIGDDRXLTNYATDLGKTVYQSTAKCITDVPDKMSTYLKQQNRWNKSFFRESIISVKKIMNNPFVALWTILEVSMFMMLVYSVVDFFVGNVREFDWLRVLAFLVIIFIVALCRNIHYMLKHPLSFLLSPFYGVLHLFVLQPLKLYSLFTIRNADWGTRKKLL

SEQ ID NO: 17 - protein, 417 aa, Streptococcus equisimilis
  MISC_FEATURE (281)..(281): Xaa = Ala, Ser or any other amino acid
MRTLKNLITVVAFSIFWVLLIYVNVYLFGAKGSLSIYGFLLIAYLLVKMSLSFFYKPFKGRAGQYKVAAIIPSYNEDAESLLETLKSVQQQTYPLAEIYVVDDGSADETGIKRIEDYVRDTGDLSSNVIVHRSEKNQGKRHAQAWAFERSDADVFLTVDSDTYIYPDALEELLKTFNDPTVFAATGHLNVRNRQTNLLTRLTDIRYDNAFGVERAAQSVTGNILVCSGPLSVYRREVVVPNIDRYINQTFLGIPVSIGDDRCLTNYATDLGKTVYQSTAKXITDVPDKMSTYLKQQNRWNKSFFRESIISVKKIMNNPFVALWTILEVSMFMMLVYSVVDFFVGNVREFDWLRVLAFLVIIFIVALCRNIHYMLKHPLSFLLSPFYGVLHLFVLQPLKLYSLFTIRNADWGTRKKLL

SEQ ID NO: 18 - protein, 417 aa, Streptococcus equisimilis
  MISC_FEATURE (367)..(367): Xaa = Ala, Ser or any other amino acid
MRTLKNLITVVAFSIFWVLLIYVNVYLFGAKGSLSIYGFLLIAYLLVKMSLSFFYKPFKGRAGQYKVAAIIPSYNEDAESLLETLKSVQQQTYPLAEIYVVDDGSADETGIKRIEDYVRDTGDLSSNVIVHRSEKNQGKRHAQAWAFERSDADVFLTVDSDTYIYPDALEELLKTFNDPTVFAATGHLNVRNRQTNLLTRLTDIRYDNAFGVERAAQSVTGNILVCSGPLSVYRREVVVPNIDRYINQTFLGIPVSIGDDRCLTNYATDLGKTVYQSTAKCITDVPDKMSTYLKQQNRWNKSFFRESIISVKKIMNNPFVALWTILEVSMFMMLVYSVVDFFVGNVREFDWLRVLAFLVIIFIVALXRNIHYMLKHPLSFLLSPFYGVLHLFVLQPLKLYSLFTIRNADWGTRKKLL

SEQ ID NO: 19 - protein, 417 aa, Streptococcus equisimilis
  MISC_FEATURE (226)..(226): Xaa = Ala, Ser or any other amino acid
  MISC_FEATURE (262)..(262): Xaa = Ala, Ser or any other amino acid
MRTLKNLITVVAFSIFWVLLIYVNVYLFGAKGSLSIYGFLLIAYLLVKMSLSFFYKPFKGRAGQYKVAAIIPSYNEDAESLLETLKSVQQQTYPLAEIYVVDDGSADETGIKRIEDYVRDTGDLSSNVIVHRSEKNQGKRHAQAWAFERSDADVFLTVDSDTYIYPDALEELLKTFNDPTVFAATGHLNVRNRQTNLLTRLTDIRYDNAFGVERAAQSVTGNILVXSGPLSVYRREVVVPNIDRYINQTFLGIPVSIGDDRXLTNYATDLGKTVYQSTAKCITDVPDKMSTYLKQQNRWNKSFFRESIISVKKIMNNPFVALWTILEVSMFMMLVYSVVDFFVGNVREFDWLRVLAFLVIIFIVALCRNIHYMLKHPLSFLLSPFYGVLHLFVLQPLKLYSLFTIRNADWGTRKKLL

SEQ ID NO: 20 - protein, 417 aa, Streptococcus equisimilis
  MISC_FEATURE (226)..(226): Xaa = Ala, Ser or any other amino acid
  MISC_FEATURE (281)..(281): Xaa = Ala, Ser or any other amino acid
MRTLKNLITVVAFSIFWVLLIYVNVYLFGAKGSLSIYGFLLIAYLLVKMSLSFFYKPFKGRAGQYKVAAIIPSYNEDAESLLETLKSVQQQTYPLAEIYVVDDGSADETGIKRIEDYVRDTGDLSSNVIVHRSEKNQGKRHAQAWAFERSDADVFLTVDSDTYIYPDALEELLKTFNDPTVFAATGHLNVRNRQTNLLTRLTDIRYDNAFGVERAAQSVTGNILVXSGPLSVYRREVVVPNIDRYINQTFLGIPVSIGDDRCLTNYATDLGKTVYQSTAKXITDVPDKMSTYLKQQNRWNKSFFRESIISVKKIMNNPFVALWTILEVSMFMMLVYSVVDFFVGNVREFDWLRVLAFLVIIFIVALCRNIHYMLKHPLSFLLSPFYGVLHLFVLQPLKLYSLFTIRNADWGTRKKLL

SEQ ID NO: 21 - protein, 417 aa, Streptococcus equisimilis
  MISC_FEATURE (226)..(226): Xaa = Ala, Ser or any other amino acid
  MISC_FEATURE (367)..(367): Xaa = Ala, Ser or any other amino acid
MRTLKNLITVVAFSIFWVLLIYVNVYLFGAKGSLSIYGFLLIAYLLVKMSLSFFYKPFKGRAGQYKVAAIIPSYNEDAESLLETLKSVQQQTYPLAEIYVVDDGSADETGIKRIEDYVRDTGDLSSNVIVHRSEKNQGKRHAQAWAFERSDADVFLTVDSDTYIYPDALEELLKTFNDPTVFAATGHLNVRNRQTNLLTRLTDIRYDNAFGVERAAQSVTGNILVXSGPLSVYRREVVVPNIDRYINQTFLGIPVSIGDDRCLTNYATDLGKTVYQSTAKCITDVPDKMSTYLKQQNRWNKSFFRESIISVKKIMNNPFVALWTILEVSMFMMLVYSVVDFFVGNVREFDWLRVLAFLVIIFIVALXRNIHYMLKHPLSFLLSPFYGVLHLFVLQPLKLYSLFTIRNADWGTRKKLL

SEQ ID NO: 22 - protein, 417 aa, Streptococcus equisimilis
  MISC_FEATURE (262)..(262): Xaa = Ala, Ser or any other amino acid
  MISC_FEATURE (281)..(281): Xaa = Ala, Ser or any other amino acid
MRTLKNLITVVAFSIFWVLLIYVNVYLFGAKGSLSIYGFLLIAYLLVKMSLSFFYKPFKGRAGQYKVAAIIPSYNEDAESLLETLKSVQQQTYPLAEIYVVDDGSADETGIKRIEDYVRDTGDLSSNVIVHRSEKNQGKRHAQAWAFERSDADVFLTVDSDTYIYPDALEELLKTFNDPTVFAATGHLNVRNRQTNLLTRLTDIRYDNAFGVERAAQSVTGNILVCSGPLSVYRREVVVPNIDRYINQTFLGIPVSIGDDRXLTNYATDLGKTVYQSTAKXITDVPDKMSTYLKQQNRWNKSFFRESIISVKKIMNNPFVALWTILEVSMFMMLVYSVVDFFVGNVREFDWLRVLAFLVIIFIVALCRNIHYMLKHPLSFLLSPFYGVLHLFVLQPLKLYSLFTIRNADWGTRKKLL

SEQ ID NO: 23 - protein, 417 aa, Streptococcus equisimilis
  MISC_FEATURE (262)..(262): Xaa = Ala, Ser or any other amino acid
  MISC_FEATURE (367)..(367): Xaa = Ala, Ser or any other amino acid
MRTLKNLITVVAFSIFWVLLIYVNVYLFGAKGSLSIYGFLLIAYLLVKMSLSFFYKPFKGRAGQYKVAAIIPSYNEDAESLLETLKSVQQQTYPLAEIYVVDDGSADETGIKRIEDYVRDTGDLSSNVIVHRSEKNQGKRHAQAWAFERSDADVFLTVDSDTYIYPDALEELLKTFNDPTVFAATGHLNVRNRQTNLLTRLTDIRYDNAFGVERAAQSVTGNILVCSGPLSVYRREVVVPNIDRYINQTFLGIPVSIGDDRXLTNYATDLGKTVYQSTAKCITDVPDKMSTYLKQQNRWNKSFFRESIISVKKIMNNPFVALWTILEVSMFMMLVYSVVDFFVGNVREFDWLRVLAFLVIIFIVALXRNIHYMLKHPLSFLLSPFYGVLHLFVLQPLKLYSLFTIRNADWGTRKKLL

SEQ ID NO: 24 - protein, 417 aa, Streptococcus equisimilis
  MISC_FEATURE (281)..(281): Xaa = Ala, Ser or any other amino acid
  MISC_FEATURE (367)..(367): Xaa = Ala, Ser or any other amino acid
MRTLKNLITVVAFSIFWVLLIYVNVYLFGAKGSLSIYGFLLIAYLLVKMSLSFFYKPFKGRAGQYKVAAIIPSYNEDAESLLETLKSVQQQTYPLAEIYVVDDGSADETGIKRIEDYVRDTGDLSSNVIVHRSEKNQGKRHAQAWAFERSDADVFLTVDSDTYIYPDALEELLKTFNDPTVFAATGHLNVRNRQTNLLTRLTDIRYDNAFGVERAAQSVTGNILVCSGPLSVYRREVVVPNIDRYINQTFLGIPVSIGDDRCLTNYATDLGKTVYQSTAKXITDVPDKMSTYLKQQNRWNKSFFRESIISVKKIMNNPFVALWTILEVSMFMMLVYSVVDFFVGNVREFDWLRVLAFLVIIFIVALXRNIHYMLKHPLSFLLSPFYGVLHLFVLQPLKLYSLFTIRNADWGTRKKLL

SEQ ID NO: 25 - protein, 417 aa, Streptococcus equisimilis
  MISC_FEATURE (262)..(262): Xaa = Ala, Ser or any other amino acid
  MISC_FEATURE (281)..(281): Xaa = Ala, Ser or any other amino acid
  MISC_FEATURE (367)..(367): Xaa = Ala, Ser or any other amino acid
MRTLKNLITVVAFSIFWVLLIYVNVYLFGAKGSLSIYGFLLIAYLLVKMSLSFFYKPFKGRAGQYKVAAIIPSYNEDAESLLETLKSVQQQTYPLAEIYVVDDGSADETGIKRIEDYVRDTGDLSSNVIVHRSEKNQGKRHAQAWAFERSDADVFLTVDSDTYIYPDALEELLKTFNDPTVFAATGHLNVRNRQTNLLTRLTDIRYDNAFGVERAAQSVTGNILVCSGPLSVYRREVVVPNIDRYINQTFLGIPVSIGDDRXLTNYATDLGKTVYQSTAKXITDVPDKMSTYLKQQNRWNKSFFRESIISVKKIMNNPFVALWTILEVSMFMMLVYSVVDFFVGNVREFDWLRVLAFLVIIFIVALXRNIHYMLKHPLSFLLSPFYGVLHLFVLQPLKLYSLFTIRNADWGTRKKLL

SEQ ID NO: 26 - protein, 417 aa, Streptococcus equisimilis
  MISC_FEATURE (226)..(226): Xaa = Ala, Ser or any other amino acid
  MISC_FEATURE (281)..(281): Xaa = Ala, Ser or any other amino acid
  MISC_FEATURE (367)..(367): Xaa = Ala, Ser or any other amino acid
MRTLKNLITVVAFSIFWVLLIYVNVYLFGAKGSLSIYGFLLIAYLLVKMSLSFFYKPFKGRAGQYKVAAIIPSYNEDAESLLETLKSVQQQTYPLAEIYVVDDGSADETGIKRIEDYVRDTGDLSSNVIVHRSEKNQGKRHAQAWAFERSDADVFLTVDSDTYIYPDALEELLKTFNDPTVFAATGHLNVRNRQTNLLTRLTDIRYDNAFGVERAAQSVTGNILVXSGPLSVYRREVVVPNIDRYINQTFLGIPVSIGDDRCLTNYATDLGKTVYQSTAKXITDVPDKMSTYLKQQNRWNKSFFRESIISVKKIMNNPFVALWTILEVSMFMMLVYSVVDFFVGNVREFDWLRVLAFLVIIFIVALXRNIHYMLKHPLSFLLSPFYGVLHLFVLQPLKLYSLFTIRNADWGTRKKLL

SEQ ID NO: 27 - protein, 417 aa, Streptococcus equisimilis
  MISC_FEATURE (226)..(226): Xaa = Ala, Ser or any other amino acid
  MISC_FEATURE (262)..(262): Xaa = Ala, Ser or any other amino acid
  MISC_FEATURE (367)..(367): Xaa = Ala, Ser or any other amino acid
MRTLKNLITVVAFSIFWVLLIYVNVYLFGAKGSLSIYGFLLIAYLLVKMSLSFFYKPFKGRAGQYKVAAIIPSYNEDAESLLETLKSVQQQTYPLAEIYVVDDGSADETGIKRIEDYVRDTGDLSSNVIVHRSEKNQGKRHAQAWAFERSDADVFLTVDSDTYIYPDALEELLKTFNDPTVFAATGHLNVRNRQTNLLTRLTDIRYDNAFGVERAAQSVTGNILVXSGPLSVYRREVVVPNIDRYINQTFLGIPVSIGDDRXLTNYATDLGKTVYQSTAKCITDVPDKMSTYLKQQNRWNKSFFRESIISVKKIMNNPFVALWTILEVSMFMMLVYSVVDFFVGNVREFDWLRVLAFLVIIFIVALXRNIHYMLKHPLSFLLSPFYGVLHLFVLQPLKLYSLFTIRNADWGTRKKLL

SEQ ID NO: 28 - protein, 417 aa, Streptococcus equisimilis
  MISC_FEATURE (226)..(226): Xaa = Ala, Ser or any other amino acid
  MISC_FEATURE (262)..(262): Xaa = Ala, Ser or any other amino acid
  MISC_FEATURE (281)..(281): Xaa = Ala, Ser or any other amino acid
MRTLKNLITVVAFSIFWVLLIYVNVYLFGAKGSLSIYGFLLIAYLLVKMSLSFFYKPFKGRAGQYKVAAIIPSYNEDAESLLETLKSVQQQTYPLAEIYVVDDGSADETGIKRIEDYVRDTGDLSSNVIVHRSEKNQGKRHAQAWAFERSDADVFLTVDSDTYIYPDALEELLKTFNDPTVFAATGHLNVRNRQTNLLTRLTDIRYDNAFGVERAAQSVTGNILVXSGPLSVYRREVVVPNIDRYINQTFLGIPVSIGDDRXLTNYATDLGKTVYQSTAKXITDVPDKMSTYLKQQNRWNKSFFRESIISVKKIMNNPFVALWTILEVSMFMMLVYSVVDFFVGNVREFDWLRVLAFLVIIFIVALCRNIHYMLKHPLSFLLSPFYGVLHLFVLQPLKLYSLFTIRNADWGTRKKLL

SEQ ID NO: 29 - protein, 417 aa, Streptococcus equisimilis
  MISC_FEATURE (226)..(226): Xaa = Ala, Ser or any other amino acid
  MISC_FEATURE (262)..(262): Xaa = Ala, Ser or any other amino acid
  MISC_FEATURE (281)..(281): Xaa = Ala, Ser or any other amino acid
  MISC_FEATURE (367)..(367): Xaa = Ala, Ser or any other amino acid
MRTLKNLITVVAFSIFWVLLIYVNVYLFGAKGSLSIYGFLLIAYLLVKMSLSFFYKPFKGRAGQYKVAAIIPSYNEDAESLLETLKSVQQQTYPLAEIYVVDDGSADETGIKRIEDYVRDTGDLSSNVIVHRSEKNQGKRHAQAWAFERSDADVFLTVDSDTYIYPDALEELLKTFNDPTVFAATGHLNVRNRQTNLLTRLTDIRYDNAFGVERAAQSVTGNILVXSGPLSVYRREVVVPNIDRYINQTFLGIPVSIGDDRXLTNYATDLGKTVYQSTAKXITDVPDKMSTYLKQQNRWNKSFFRESIISVKKIMNNPFVALWTILEVSMFMMLVYSVVDFFVGNVREFDWLRVLAFLVIIFIVALXRNIHYMLKHPLSFLLSPFYGVLHLFVLQPLKLYSLFTIRNADWGTRKKLL

SEQ ID NO: 30 - protein, 419 aa, Streptococcus pyogenes
  MISC_FEATURE (124)..(124): Xaa = Ala, Ser or any other amino acid
MPIFKKTLIVLSFIFLISILIYLNMYLFGTSTVGIYGVILITYLVIKLGLSFLYEPFKGNPHDYKVAAVIPSYNEDAESLLETLKSVLAQTYPLSEIYIVDDGSSNTDAIQLIEEYVNREVDIXRNVIVHRSLVNKGKRHAQAWAFERSDADVFLTVDSDTYIYPNALEELLKSFNDETVYAATGHLNARNRQTNLLTRLTDIRYDNAFGVERAAQSLTGNILVCSGPLSIYRREVIIPNLERYKNQTFLGLPVSIGDDRCLTNYAIDLGRTVYQSTARCDTDVPFQLKSYLKQQNRWNKSFFRESIISVKKILSNPIVALWTIFEVVMFMMLIVAIGNLLFNQAIQLDLIKLFAFLSIIFIVALCRNVHYMVKHPASFLLSPLYGILHLFVLQPLKLYSLCTIKNTEWGTRKKVTIFK

SEQ ID NO: 31 - protein, 419 aa, Streptococcus pyogenes
  MISC_FEATURE (225)..(225): Xaa = Ala, Ser or any other amino acid
MPIFKKTLIVLSFIFLISILIYLNMYLFGTSTVGIYGVILITYLVIKLGLSFLYEPFKGNPHDYKVAAVIPSYNEDAESLLETLKSVLAQTYPLSEIYIVDDGSSNTDAIQLIEEYVNREVDICRNVIVHRSLVNKGKRHAQAWAFERSDADVFLTVDSDTYIYPNALEELLKSFNDETVYAATGHLNARNRQTNLLTRLTDIRYDNAFGVERAAQSLTGNILVXSGPLSIYRREVIIPNLERYKNQTFLGLPVSIGDDRCLTNYAIDLGRTVYQSTARCDTDVPFQLKSYLKQQNRWNKSFFRESIISVKKILSNPIVALWTIFEVVMFMMLIVAIGNLLFNQAIQLDLIKLFAFLSIIFIVALCRNVHYMVKHPASFLLSPLYGILHLFVLQPLKLYSLCTIKNTEWGTRKKVTIFK

SEQ ID NO: 32 - protein, 419 aa, Streptococcus pyogenes
  MISC_FEATURE (261)..(261): Xaa = Ala, Ser or any other amino acid
MPIFKKTLIVLSFIFLISILIYLNMYLFGTSTVGIYGVILITYLVIKLGLSFLYEPFKGNPHDYKVAAVIPSYNEDAESLLETLKSVLAQTYPLSEIYIVDDGSSNTDAIQLIEEYVNREVDICRNVIVHRSLVNKGKRHAQAWAFERSDADVFLTVDSDTYIYPNALEELLKSFNDETVYAATGHLNARNRQTNLLTRLTDIRYDNAFGVERAAQSLTGNILVCSGPLSIYRREVIIPNLERYKNQTFLGLPVSIGDDRXLTNYAIDLGRTVYQSTARCDTDVPFQLKSYLKQQNRWNKSFFRESIISVKKILSNPIVALWTIFEVVMFMMLIVAIGNLLFNQAIQLDLIKLFAFLSIIFIVALCRNVHYMVKHPASFLLSPLYGILHLFVLQPLKLYSLCTIKNTEWGTRKKVTIFK

SEQ ID NO: 33 - protein, 419 aa, Streptococcus pyogenes
  MISC_FEATURE (280)..(280): Xaa = Ala, Ser or any other amino acid
MPIFKKTLIVLSFIFLISILIYLNMYLFGTSTVGIYGVILITYLVIKLGLSFLYEPFKGNPHDYKVAAVIPSYNEDAESLLETLKSVLAQTYPLSEIYIVDDGSSNTDAIQLIEEYVNREVDICRNVIVHRSLVNKGKRHAQAWAFERSDADVFLTVDSDTYIYPNALEELLKSFNDETVYAATGHLNARNRQTNLLTRLTDIRYDNAFGVERAAQSLTGNILVCSGPLSIYRREVIIPNLERYKNQTFLGLPVSIGDDRCLTNYAIDLGRTVYQSTARXDTDVPFQLKSYLKQQNRWNKSFFRESIISVKKILSNPIVALWTIFEVVMFMMLIVAIGNLLFNQAIQLDLIKLFAFLSIIFIVALCRNVHYMVKHPASFLLSPLYGILHLFVLQPLKLYSLCTIKNTEWGTRKKVTIFK

SEQ ID NO: 34 - protein, 419 aa, Streptococcus pyogenes
  MISC_FEATURE (366)..(366): Xaa = Ala, Ser or any other amino acid
MPIFKKTLIVLSFIFLISILIYLNMYLFGTSTVGIYGVILITYLVIKLGLSFLYEPFKGNPHDYKVAAVIPSYNEDAESLLETLKSVLAQTYPLSEIYIVDDGSSNTDAIQLIEEYVNREVDICRNVIVHRSLVNKGKRHAQAWAFERSDADVFLTVDSDTYIYPNALEELLKSFNDETVYAATGHLNARNRQTNLLTRLTDIRYDNAFGVERAAQSLTGNILVCSGPLSIYRREVIIPNLERYKNQTFLGLPVSIGDDRCLTNYAIDLGRTVYQSTARCDTDVPFQLKSYLKQQNRWNKSFFRESIISVKKILSNPIVALWTIFEVVMFMMLIVAIGNLLFNQAIQLDLIKLFAFLSIIFIVALXRNVHYMVKHPASFLLSPLYGILHLFVLQPLKLYSLCTIKNTEWGTRKKVTIFK

SEQ ID NO: 35 - protein, 419 aa, Streptococcus pyogenes
  MISC_FEATURE (402)..(402): Xaa = Ala, Ser or any other amino acid
MPIFKKTLIVLSFIFLISILIYLNMYLFGTSTVGIYGVILITYLVIKLGLSFLYEPFKGNPHDYKVAAVIPSYNEDAESLLETLKSVLAQTYPLSEIYIVDDGSSNTDAIQLIEEYVNREVDICRNVIVHRSLVNKGKRHAQAWAFERSDADVFLTVDSDTYIYPNALEELLKSFNDETVYAATGHLNARNRQTNLLTRLTDIRYDNAFGVERAAQSLTGNILVCSGPLSIYRREVIIPNLERYKNQTFLGLPVSIGDDRCLTNYAIDLGRTVYQSTARCDTDVPFQLKSYLKQQNRWNKSFFRESIISVKKILSNPIVALWTIFEVVMFMMLIVAIGNLLFNQAIQLDLIKLFAFLSIIFIVALCRNVHYMVKHPASFLLSPLYGILHLFVLQPLKLYSLXTIKNTEWGTRKKVTIFK

SEQ ID NO: 36 - protein, 419 aa, Streptococcus pyogenes
  MISC_FEATURE (124)..(124): Xaa = Ala, Ser or any other amino acid
  MISC_FEATURE (225)..(225): Xaa = Ala, Ser or any other amino acid
MPIFKKTLIVLSFIFLISILIYLNMYLFGTSTVGIYGVILITYLVIKLGLSFLYEPFKGNPHDYKVAAVIPSYNEDAESLLETLKSVLAQTYPLSEIYIVDDGSSNTDAIQLIEEYVNREVDIXRNVIVHRSLVNKGKRHAQAWAFERSDADVFLTVDSDTYIYPNALEELLKSFNDETVYAATGHLNARNRQTNLLTRLTDIRYDNAFGVERAAQSLTGNILVXSGPLSIYRREVIIPNLERYKNQTFLGLPVSIGDDRCLTNYAIDLGRTVYQSTARCDTDVPFQLKSYLKQQNRWNKSFFRESIISVKKILSNPIVALWTIFEVVMFMMLIVAIGNLLFNQAIQLDLIKLFAFLSIIFIVALCRNVHYMVKHPASFLLSPLYGILHLFVLQPLKLYSLCTIKNTEWGTRKKVTIFK

SEQ ID NO: 37 - protein, 419 aa, Streptococcus pyogenes
  MISC_FEATURE (124)..(124): Xaa = Ala, Ser or any other amino acid
  MISC_FEATURE (261)..(261): Xaa = Ala, Ser or any other amino acid
MPIFKKTLIVLSFIFLISILIYLNMYLFGTSTVGIYGVILITYLVIKLGLSFLYEPFKGNPHDYKVAAVIPSYNEDAESLLETLKSVLAQTYPLSEIYIVDDGSSNTDAIQLIEEYVNREVDIXRNVIVHRSLVNKGKRHAQAWAFERSDADVFLTVDSDTYIYPNALEELLKSFNDETVYAATGHLNARNRQTNLLTRLTDIRYDNAFGVERAAQSLTGNILVCSGPLSIYRREVIIPNLERYKNQTFLGLPVSIGDDRXLTNYAIDLGRTVYQSTARCDTDVPFQLKSYLKQQNRWNKSFFRESIISVKKILSNPIVALWTIFEVVMFMMLIVAIGNLLFNQAIQLDLIKLFAFLSIIFIVALCRNVHYMVKHPASFLLSPLYGILHLFVLQPLKLYSLCTIKNTEWGTRKKVTIFK

SEQ ID NO: 38 - protein, 419 aa, Streptococcus pyogenes
  MISC_FEATURE (124)..(124): Xaa = Ala, Ser or any other amino acid
  MISC_FEATURE (280)..(280): Xaa = Ala, Ser or any other amino acid
MPIFKKTLIVLSFIFLISILIYLNMYLFGTSTVGIYGVILITYLVIKLGLSFLYEPFKGNPHDYKVAAVIPSYNEDAESLLETLKSVLAQTYPLSEIYIVDDGSSNTDAIQLIEEYVNREVDIXRNVIVHRSLVNKGKRHAQAWAFERSDADVFLTVDSDTYIYPNALEELLKSFNDETVYAATGHLNARNRQTNLLTRLTDIRYDNAFGVERAAQSLTGNILVCSGPLSIYRREVIIPNLERYKNQTFLGLPVSIGDDRCLTNYAIDLGRTVYQSTARXDTDVPFQLKSYLKQQNRWNKSFFRESIISVKKILSNPIVALWTIFEVVMFMMLIVAIGNLLFNQAIQLDLIKLFAFLSIIFIVALCRNVHYMVKHPASFLLSPLYGILHLFVLQPLKLYSLCTIKNTEWGTRKKVTIFK

SEQ ID NO: 39 - protein, 419 aa, Streptococcus pyogenes
  MISC_FEATURE (124)..(124): Xaa = Ala, Ser or any other amino acid
  MISC_FEATURE (366)..(366): Xaa = Ala, Ser or any other amino acid
MPIFKKTLIVLSFIFLISILIYLNMYLFGTSTVGIYGVILITYLVIKLGLSFLYEPFKGNPHDYKVAAVIPSYNEDAESLLETLKSVLAQTYPLSEIYIVDDGSSNTDAIQLIEEYVNREVDIXRNVIVHRSLVNKGKRHAQAWAFERSDADVFLTVDSDTYIYPNALEELLKSFNDETVYAATGHLNARNRQTNLLTRLTDIRYDNAFGVERAAQSLTGNILVCSGPLSIYRREVIIPNLERYKNQTFLGLPVSIGDDRCLTNYAIDLGRTVYQSTARCDTDVPFQLKSYLKQQNRWNKSFFRESIISVKKILSNPIVALWTIFEVVMFMMLIVAIGNLLFNQAIQLDLIKLFAFLSIIFIVALXRNVHYMVKHPASFLLSPLYGILHLFVLQPLKLYSLCTIKNTEWGTRKKVTIFK

SEQ ID NO: 40 - protein, 419 aa, Streptococcus pyogenes
  MISC_FEATURE (124)..(124): Xaa = Ala, Ser or any other amino acid
  MISC_FEATURE (402)..(402): Xaa = Ala, Ser or any other amino acid
MPIFKKTLIVLSFIFLISILIYLNMYLFGTSTVGIYGVILITYLVIKLGLSFLYEPFKGNPHDYKVAAVIPSYNEDAESLLETLKSVLAQTYPLSEIYIVDDGSSNTDAIQLIEEYVNREVDIXRNVIVHRSLVNKGKRHAQAWAFERSDADVFLTVDSDTYIYPNALEELLKSFNDETVYAATGHLNARNRQTNLLTRLTDIRYDNAFGVERAAQSLTGNILVCSGPLSIYRREVIIPNLERYKNQTFLGLPVSIGDDRCLTNYAIDLGRTVYQSTARCDTDVPFQLKSYLKQQNRWNKSFFRESIISVKKILSNPIVALWTIFEVVMFMMLIVAIGNLLFNQAIQLDLIKLFAFLSIIFIVALCRNVHYMVKHPASFLLSPLYGILHLFVLQPLKLYSLXTIKNTEWGTRKKVTIFK

SEQ ID NO: 41 - protein, 419 aa, Streptococcus pyogenes
  MISC_FEATURE (225)..(225): Xaa = Ala, Ser or any other amino acid
  MISC_FEATURE (261)..(261): Xaa = Ala, Ser or any other amino acid
MPIFKKTLIVLSFIFLISILIYLNMYLFGTSTVGIYGVILITYLVIKLGLSFLYEPFKGNPHDYKVAAVIPSYNEDAESLLETLKSVLAQTYPLSEIYIVDDGSSNTDAIQLIEEYVNREVDICRNVIVHRSLVNKGKRHAQAWAFERSDADVFLTVDSDTYIYPNALEELLKSFNDETVYAATGHLNARNRQTNLLTRLTDIRYDNAFGVERAAQSLTGNILVXSGPLSIYRREVIIPNLERYKNQTFLGLPVSIGDDRXLTNYAIDLGRTVYQSTARCDTDVPFQLKSYLKQQNRWNKSFFRESIISVKKILSNPIVALWTIFEVVMFMMLIVAIGNLLFNQAIQLDLIKLFAFLSIIFIVALCRNVHYMVKHPASFLLSPLYGILHLFVLQPLKLYSLCTIKNTEWGTRKKVTIFK

SEQ ID NO: 42 - protein, 419 aa, Streptococcus pyogenes
  MISC_FEATURE (225)..(280): Xaa = Ala, Ser or any other amino acid
  MISC_FEATURE (280)..(280): Xaa = Ala, Ser or any other amino acid
MPIFKKTLIVLSFIFLISILIYLNMYLFGTSTVGIYGVILITYLVIKLGLSFLYEPFKGNPHDYKVAAVIPSYNEDAESLLETLKSVLAQTYPLSEIYIVDDGSSNTDAIQLIEEYVNREVDICRNVIVHRSLVNKGKRHAQAWAFERSDADVFLTVDSDTYIYPNALEELLKSFNDETVYAATGHLNARNRQTNLLTRLTDIRYDNAFGVERAAQSLTGNILVXSGPLSIYRREVIIPNLERYKNQTFLGLPVSIGDDRCLTNYAIDLGRTVYQSTARXDTDVPFQLKSYLKQQNRWNKSFFRESIISVKKILSNPIVALWTIFEVVMFMMLIVAIGNLLFNQAIQLDLIKLFAFLSIIFIVALCRNVHYMVKHPASFLLSPLYGILHLFVLQPLKLYSLCTIKNTEWGTRKKVTIFK

SEQ ID NO: 43 - protein, 419 aa, Streptococcus pyogenes
  MISC_FEATURE (225)..(225): Xaa = Ala, Ser or any other amino acid
  MISC_FEATURE (366)..(366): Xaa = Ala, Ser or any other amino acid
MPIFKKTLIVLSFIFLISILIYLNMYLFGTSTVGIYGVILITYLVIKLGLSFLYEPFKGNPHDYKVAAVIPSYNEDAESLLETLKSVLAQTYPLSEIYIVDDGSSNTDAIQLIEEYVNREVDICRNVIVHRSLVNKGKRHAQAWAFERSDADVFLTVDSDTYIYPNALEELLKSFNDETVYAATGHLNARNRQTNLLTRLTDIRYDNAFGVERAAQSLTGNILVXSGPLSIYRREVIIPNLERYKNQTFLGLPVSIGDDRCLTNYAIDLGRTVYQSTARCDTDVPFQLKSYLKQQNRWNKSFFRESIISVKKILSNPIVALWTIFEVVMFMMLIVAIGNLLFNQAIQLDLIKLFAFLSIIFIVALXRNVHYMVKHPASFLLSPLYGILHLFVLQPLKLYSLCTIKNTEWGTRKKVTIFK

SEQ ID NO: 44 - protein, 419 aa, Streptococcus pyogenes
  MISC_FEATURE (225)..(225): Xaa = Ala, Ser or any other amino acid
  MISC_FEATURE (402)..(402): Xaa = Ala, Ser or any other amino acid
MPIFKKTLIVLSFIFLISILIYLNMYLFGTSTVGIYGVILITYLVIKLGLSFLYEPFKGNPHDYKVAAVIPSYNEDAESLLETLKSVLAQTYPLSEIYIVDDGSSNTDAIQLIEEYVNREVDICRNVIVHRSLVNKGKRHAQAWAFERSDADVFLTVDSDTYIYPNALEELLKSFNDETVYAATGHLNARNRQTNLLTRLTDIRYDNAFGVERAAQSLTGNILVXSGPLSIYRREVIIPNLERYKNQTFLGLPVSIGDDRCLTNYAIDLGRTVYQSTARCDTDVPFQLKSYLKQQNRWNKSFFRESIISVKKILSNPIVALWTIFEVVMFMMLIVAIGNLLFNQAIQLDLIKLFAFLSIIFIVALCRNVHYMVKHPASFLLSPLYGILHLFVLQPLKLYSLXTIKNTEWGTRKKVTIFK

SEQ ID NO: 45 - protein, 419 aa, Streptococcus pyogenes
  MISC_FEATURE (261)..(261): Xaa = Ala, Ser or any other amino acid
  MISC_FEATURE (280)..(280): Xaa = Ala, Ser or any other amino acid
MPIFKKTLIVLSFIFLISILIYLNMYLFGTSTVGIYGVILITYLVIKLGLSFLYEPFKGNPHDYKVAAVIPSYNEDAESLLETLKSVLAQTYPLSEIYIVDDGSSNTDAIQLIEEYVNREVDICRNVIVHRSLVNKGKRHAQAWAFERSDADVFLTVDSDTYIYPNALEELLKSFNDETVYAATGHLNARNRQTNLLTRLTDIRYDNAFGVERAAQSLTGNILVCSGPLSIYRREVIIPNLERYKNQTFLGLPVSIGDDRXLTNYAIDLGRTVYQSTARXDTDVPFQLKSYLKQQNRWNKSFFRESIISVKKILSNPIVALWTIFEVVMFMMLIVAIGNLLFNQAIQLDLIKLFAFLSIIFIVALCRNVHYMVKHPASFLLSPLYGILHLFVLQPLKLYSLCTIKNTEWGTRKKVTIFK

SEQ ID NO: 46 - protein, 419 aa, Streptococcus pyogenes
  MISC_FEATURE (261)..(261): Xaa = Ala, Ser or any other amino acid
  MISC_FEATURE (366)..(366): Xaa = Ala, Ser or any other amino acid
MPIFKKTLIVLSFIFLISILIYLNMYLFGTSTVGIYGVILITYLVIKLGLSFLYEPFKGNPHDYKVAAVIPSYNEDAESLLETLKSVLAQTYPLSEIYIVDDGSSNTDAIQLIEEYVNREVDICRNVIVHRSLVNKGKRHAQAWAFERSDADVFLTVDSDTYIYPNALEELLKSFNDETVYAATGHLNARNRQTNLLTRLTDIRYDNAFGVERAAQSLTGNILVCSGPLSIYRREVIIPNLERYKNQTFLGLPVSIGDDRXLTNYAIDLGRTVYQSTARCDTDVPFQLKSYLKQQNRWNKSFFRESIISVKKILSNPIVALWTIFEVVMFMMLIVAIGNLLFNQAIQLDLIKLFAFLSIIFIVALXRNVHYMVKHPASFLLSPLYGILHLFVLQPLKLYSLCTIKNTEWGTRKKVTIFK

SEQ ID NO: 47 - protein, 419 aa, Streptococcus pyogenes
  MISC_FEATURE (261)..(261): Xaa = Ala, Ser or any other amino acid
  MISC_FEATURE (402)..(402): Xaa = Ala, Ser or any other amino acid
MPIFKKTLIVLSFIFLISILIYLNMYLFGTSTVGIYGVILITYLVIKLGLSFLYEPFKGNPHDYKVAAVIPSYNEDAESLLETLKSVLAQTYPLSEIYIVDDGSSNTDAIQLIEEYVNREVDICRNVIVHRSLVNKGKRHAQAWAFERSDADVFLTVDSDTYIYPNALEELLKSFNDETVYAATGHLNARNRQTNLLTRLTDIRYDNAFGVERAAQSLTGNILVCSGPLSIYRREVIIPNLERYKNQTFLGLPVSIGDDRXLTNYAIDLGRTVYQSTARCDTDVPFQLKSYLKQQNRWNKSFFRESIISVKKILSNPIVALWTIFEVVMFMMLIVAIGNLLFNQAIQLDLIKLFAFLSIIFIVALCRNVHYMVKHPASFLLSPLYGILHLFVLQPLKLYSLXTIKNTEWGTRKKVTIFK

SEQ ID NO: 48 - protein, 419 aa, Streptococcus pyogenes
  MISC_FEATURE (280)..(280): Xaa = Ala, Ser or any other amino acid
  MISC_FEATURE (366)..(366): Xaa = Ala, Ser or any other amino acid
MPIFKKTLIVLSFIFLISILIYLNMYLFGTSTVGIYGVILITYLVIKLGLSFLYEPFKGNPHDYKVAAVIPSYNEDAESLLETLKSVLAQTYPLSEIYIVDDGSSNTDAIQLIEEYVNREVDICRNVIVHRSLVNKGKRHAQAWAFERSDADVFLTVDSDTYIYPNALEELLKSFNDETVYAATGHLNARNRQTNLLTRLTDIRYDNAFGVERAAQSLTGNILVCSGPLSIYRREVIIPNLERYKNQTFLGLPVSIGDDRCLTNYAIDLGRTVYQSTARXDTDVPFQLKSYLKQQNRWNKSFFRESIISVKKILSNPIVALWTIFEVVMFMMLIVAIGNLLFNQAIQLDLIKLFAFLSIIFIVALXRNVHYMVKHPASFLLSPLYGILHLFVLQPLKLYSLCTIKNTEWGTRKKVTIFK

SEQ ID NO: 49 - protein, 419 aa, Streptococcus pyogenes
  MISC_FEATURE (280)..(280): Xaa = Ala, Ser or any other amino acid
  MISC_FEATURE (402)..(402): Xaa = Ala, Ser or any other amino acid
MPIFKKTLIVLSFIFLISILIYLNMYLFGTSTVGIYGVILITYLVIKLGLSFLYEPFKGNPHDYKVAAVIPSYNEDAESLLETLKSVLAQTYPLSEIYIVDDGSSNTDAIQLIEEYVNREVDICRNVIVHRSLVNKGKRHAQAWAFERSDADVFLTVDSDTYIYPNALEELLKSFNDETVYAATGHLNARNRQTNLLTRLTDIRYDNAFGVERAAQSLTGNILVCSGPLSIYRREVIIPNLERYKNQTFLGLPVSIGDDRCLTNYAIDLGRTVYQSTARXDTDVPFQLKSYLKQQNRWNKSFFRESIISVKKILSNPIVALWTIFEVVMFMMLIVAIGNLLFNQAIQLDLIKLFAFLSIIFIVALCRNVHYMVKHPASFLLSPLYGILHLFVLQPLKLYSLXTIKNTEWGTRKKVTIFK

SEQ ID NO: 50 - protein, 419 aa, Streptococcus pyogenes
  MISC_FEATURE (366)..(366): Xaa= Ala, Ser or any other amino acid
  MISC_FEATURE (402)..(402): Xaa= Ala, Ser or any other amino acid
MPIFKKTLIVLSFIFLISILIYLNMYLFGTSTVGIYGVILITYLVIKLGLSFLYEPFKGNPHDYKVAAVIPSYNEDAESLLETLKSVLAQTYPLSEIYIVDDGSSNTDAIQLIEEYVNREVDICRNVIVHRSLVNKGKRHAQAWAFERSDADVFLTVDSDTYIYPNALEELLKSFNDETVYAATGHLNARNRQTNLLTRLTDIRYDNAFGVERAAQSLTGNILVCSGPLSIYRREVIIPNLERYKNQTFLGLPVSIGDDRCLTNYAIDLGRTVYQSTARCDTDVPFQLKSYLKQQNRWNKSFFRESIISVKKILSNPIVALWTIFEVVMFMMLIVAIGNLLFNQAIQLDLIKLFAFLSIIFIVALXRNVHYMVKHPASFLLSPLYGILHLFVLQPLKLYSLXTIKNTEWGTRKKVTIFK

SEQ ID NO: 51 - protein, 419 aa, Streptococcus pyogenes
  MISC_FEATURE (124)..(124): Xaa = Ala, Ser or any other amino acid
  MISC_FEATURE (225)..(225): Xaa = Ala, Ser or any other amino acid
  MISC_FEATURE (261)..(261): Xaa = Ala, Ser or any other amino acid
MPIFKKTLIVLSFIFLISILIYLNMYLFGTSTVGIYGVILITYLVIKLGLSFLYEPFKGNPHDYKVAAVIPSYNEDAESLLETLKSVLAQTYPLSEIYIVDDGSSNTDAIQLIEEYVNREVDIXRNVIVHRSLVNKGKRHAQAWAFERSDADVFLTVDSDTYIYPNALEELLKSFNDETVYAATGHLNARNRQTNLLTRLTDIRYDNAFGVERAAQSLTGNILVXSGPLSIYRREVIIPNLERYKNQTFLGLPVSIGDDRXLTNYAIDLGRTVYQSTARCDTDVPFQLKSYLKQQNRWNKSFFRESIISVKKILSNPIVALWTIFEVVMFMMLIVAIGNLLFNQAIQLDLIKLFAFLSIIFIVALCRNVHYMVKHPASFLLSPLYGILHLFVLQPLKLYSLCTIKNTEWGTRKKVTIFK

SEQ ID NO: 52 - protein, 419 aa, Streptococcus pyogenes
  MISC_FEATURE (124)..(124): Xaa = Ala, Ser or any other amino acid
  MISC_FEATURE (225)..(225): Xaa = Ala, Ser or any other amino acid
  MISC_FEATURE (280)..(280): Xaa = Ala, Ser or any other amino acid
MPIFKKTLIVLSFIFLISILIYLNMYLFGTSTVGIYGVILITYLVIKLGLSFLYEPFKGNPHDYKVAAVIPSYNEDAESLLETLKSVLAQTYPLSEIYIVDDGSSNTDAIQLIEEYVNREVDIXRNVIVHRSLVNKGKRHAQAWAFERSDADVFLTVDSDTYIYPNALEELLKSFNDETVYAATGHLNARNRQTNLLTRLTDIRYDNAFGVERAAQSLTGNILVXSGPLSIYRREVIIPNLERYKNQTFLGLPVSIGDDRCLTNYAIDLGRTVYQSTARXDTDVPFQLKSYLKQQNRWNKSFFRESIISVKKILSNPIVALWTIFEVVMFMMLIVAIGNLLFNQAIQLDLIKLFAFLSIIFIVALCRNVHYMVKHPASFLLSPLYGILHLFVLQPLKLYSLCTIKNTEWGTRKKVTIFK

SEQ ID NO: 53 - protein, 419 aa, Streptococcus pyogenes
  MISC_FEATURE (124)..(124): Xaa = Ala, Ser or any other amino acid
  MISC_FEATURE (225)..(225): Xaa = Ala, Ser or any other amino acid
  MISC_FEATURE (366)..(366): Xaa = Ala, Ser or any other amino acid
MPIFKKTLIVLSFIFLISILIYLNMYLFGTSTVGIYGVILITYLVIKLGLSFLYEPFKGNPHDYKVAAVIPSYNEDAESLLETLKSVLAQTYPLSEIYIVDDGSSNTDAIQLIEEYVNREVDIXRNVIVHRSLVNKGKRHAQAWAFERSDADVFLTVDSDTYIYPNALEELLKSFNDETVYAATGHLNARNRQTNLLTRLTDIRYDNAFGVERAAQSLTGNILVXSGPLSIYRREVIIPNLERYKNQTFLGLPVSIGDDRCLTNYAIDLGRTVYQSTARCDTDVPFQLKSYLKQQNRWNKSFFRESIISVKKILSNPIVALWTIFEVVMFMMLIVAIGNLLFNQAIQLDLIKLFAFLSIIFIVALXRNVHYMVKHPASFLLSPLYGILHLFVLQPLKLYSLCTIKNTEWGTRKKVTIFK

SEQ ID NO: 54 - protein, 419 aa, Streptococcus pyogenes
  MISC_FEATURE (124)..(124): Xaa = Ala, Ser or any other amino acid
  MISC_FEATURE (225)..(225): Xaa = Ala, Ser or any other amino acid
  MISC_FEATURE (402)..(402): Xaa = Ala, Ser or any other amino acid
MPIFKKTLIVLSFIFLISILIYLNMYLFGTSTVGIYGVILITYLVIKLGLSFLYEPFKGNPHDYKVAAVIPSYNEDAESLLETLKSVLAQTYPLSEIYIVDDGSSNTDAIQLIEEYVNREVDIXRNVIVHRSLVNKGKRHAQAWAFERSDADVFLTVDSDTYIYPNALEELLKSFNDETVYAATGHLNARNRQTNLLTRLTDIRYDNAFGVERAAQSLTGNILVXSGPLSIYRREVIIPNLERYKNQTFLGLPVSIGDDRCLTNYAIDLGRTVYQSTARCDTDVPFQLKSYLKQQNRWNKSFFRESIISVKKILSNPIVALWTIFEVVMFMMLIVAIGNLLFNQAIQLDLIKLFAFLSIIFIVALCRNVHYMVKHPASFLLSPLYGILHLFVLQPLKLYSLXTIKNTEWGTRKKVTIFK

SEQ ID NO: 55 - protein, 419 aa, Streptococcus pyogenes
  MISC_FEATURE (124)..(124): Xaa = Ala, Ser or any other amino acid
  MISC_FEATURE (261)..(261): Xaa = Ala, Ser or any other amino acid
  MISC_FEATURE (280)..(280): Xaa = Ala, Ser or any other amino acid
MPIFKKTLIVLSFIFLISILIYLNMYLFGTSTVGIYGVILITYLVIKLGLSFLYEPFKGNPHDYKVAAVIPSYNEDAESLLETLKSVLAQTYPLSEIYIVDDGSSNTDAIQLIEEYVNREVDIXRNVIVHRSLVNKGKRHAQAWAFERSDADVFLTVDSDTYIYPNALEELLKSFNDETVYAATGHLNARNRQTNLLTRLTDIRYDNAFGVERAAQSLTGNILVCSGPLSIYRREVIIPNLERYKNQTFLGLPVSIGDDRXLTNYAIDLGRTVYQSTARXDTDVPFQLKSYLKQQNRWNKSFFRESIISVKKILSNPIVALWTIFEVVMFMMLIVAIGNLLFNQAIQLDLIKLFAFLSIIFIVALCRNVHYMVKHPASFLLSPLYGILHLFVLQPLKLYSLCTIKNTEWGTRKKVTIFK

SEQ ID NO: 56 - protein, 419 aa, Streptococcus pyogenes
  MISC_FEATURE (124)..(124): Xaa = Ala, Ser or any other amino acid
  MISC_FEATURE (261)..(261): Xaa = Ala, Ser or any other amino acid
  MISC_FEATURE (366)..(366): Xaa = Ala, Ser or any other amino acid
MPIFKKTLIVLSFIFLISILIYLNMYLFGTSTVGIYGVILITYLVIKLGLSFLYEPFKGNPHDYKVAAVIPSYNEDAESLLETLKSVLAQTYPLSEIYIVDDGSSNTDAIQLIEEYVNREVDIXRNVIVHRSLVNKGKRHAQAWAFERSDADVFLTVDSDTYIYPNALEELLKSFNDETVYAATGHLNARNRQTNLLTRLTDIRYDNAFGVERAAQSLTGNILVCSGPLSIYRREVIIPNLERYKNQTFLGLPVSIGDDRXLTNYAIDLGRTVYQSTARCDTDVPFQLKSYLKQQNRWNKSFFRESIISVKKILSNPIVALWTIFEVVMFMMLIVAIGNLLFNQAIQLDLIKLFAFLSIIFIVALXRNVHYMVKHPASFLLSPLYGILHLFVLQPLKLYSLCTIKNTEWGTRKKVTIFK

SEQ ID NO: 57 - protein, 419 aa, Streptococcus pyogenes
  MISC_FEATURE (124)..(124): Xaa = Ala, Ser or any other amino acid
  MISC_FEATURE (261)..(261): Xaa = Ala, Ser or any other amino acid
  MISC_FEATURE (402)..(402): Xaa = Ala, Ser or any other amino acid
MPIFKKTLIVLSFIFLISILIYLNMYLFGTSTVGIYGVILITYLVIKLGLSFLYEPFKGNPHDYKVAAVIPSYNEDAESLLETLKSVLAQTYPLSEIYIVDDGSSNTDAIQLIEEYVNREVDIXRNVIVHRSLVNKGKRHAQAWAFERSDADVFLTVDSDTYIYPNALEELLKSFNDETVYAATGHLNARNRQTNLLTRLTDIRYDNAFGVERAAQSLTGNILVCSGPLSIYRREVIIPNLERYKNQTFLGLPVSIGDDRXLTNYAIDLGRTVYQSTARCDTDVPFQLKSYLKQQNRWNKSFFRESIISVKKILSNPIVALWTIFEVVMFMMLIVAIGNLLFNQAIQLDLIKLFAFLSIIFIVALCRNVHYMVKHPASFLLSPLYGILHLFVLQPLKLYSLXTIKNTEWGTRKKVTIFK

SEQ ID NO: 58 - protein, 419 aa, Streptococcus pyogenes
  MISC_FEATURE (124)..(124): Xaa = Ala, Ser or any other amino acid
  MISC_FEATURE (280)..(280): Xaa = Ala, Ser or any other amino acid
  MISC_FEATURE (366)..(366): Xaa = Ala, Ser or any other amino acid
MPIFKKTLIVLSFIFLISILIYLNMYLFGTSTVGIYGVILITYLVIKLGLSFLYEPFKGNPHDYKVAAVIPSYNEDAESLLETLKSVLAQTYPLSEIYIVDDGSSNTDAIQLIEEYVNREVDIXRNVIVHRSLVNKGKRHAQAWAFERSDADVFLTVDSDTYIYPNALEELLKSFNDETVYAATGHLNARNRQTNLLTRLTDIRYDNAFGVERAAQSLTGNILVCSGPLSIYRREVIIPNLERYKNQTFLGLPVSIGDDRCLTNYAIDLGRTVYQSTARXDTDVPFQLKSYLKQQNRWNKSFFRESIISVKKILSNPIVALWTIFEVVMFMMLIVAIGNLLFNQAIQLDLIKLFAFLSIIFIVALXRNVHYMVKHPASFLLSPLYGILHLFVLQPLKLYSLCTIKNTEWGTRKKVTIFK

SEQ ID NO: 59 - protein, 419 aa, Streptococcus pyogenes
  MISC_FEATURE (124)..(124): Xaa = Ala, Ser or any other amino acid
  MISC_FEATURE (280)..(280): Xaa = Ala, Ser or any other amino acid
  MISC_FEATURE (402)..(402): Xaa = Ala, Ser or any other amino acid
MPIFKKTLIVLSFIFLISILIYLNMYLFGTSTVGIYGVILITYLVIKLGLSFLYEPFKGNPHDYKVAAVIPSYNEDAESLLETLKSVLAQTYPLSEIYIVDDGSSNTDAIQLIEEYVNREVDIXRNVIVHRSLVNKGKRHAQAWAFERSDADVFLTVDSDTYIYPNALEELLKSFNDETVYAATGHLNARNRQTNLLTRLTDIRYDNAFGVERAAQSLTGNILVCSGPLSIYRREVIIPNLERYKNQTFLGLPVSIGDDRCLTNYAIDLGRTVYQSTARXDTDVPFQLKSYLKQQNRWNKSFFRESIISVKKILSNPIVALWTIFEVVMFMMLIVAIGNLLFNQAIQLDLIKLFAFLSIIFIVALCRNVHYMVKHPASFLLSPLYGILHLFVLQPLKLYSLXTIKNTEWGTRKKVTIFK

SEQ ID NO: 60 - protein, 419 aa, Streptococcus pyogenes
  MISC_FEATURE (124)..(124): Xaa = Ala, Ser or any other amino acid
  MISC_FEATURE (366)..(366): Xaa = Ala, Ser or any other amino acid
  MISC_FEATURE (402)..(402): Xaa = Ala, Ser or any other amino acid
MPIFKKTLIVLSFIFLISILIYLNMYLFGTSTVGIYGVILITYLVIKLGLSFLYEPFKGNPHDYKVAAVIPSYNEDAESLLETLKSVLAQTYPLSEIYIVDDGSSNTDAIQLIEEYVNREVDIXRNVIVHRSLVNKGKRHAQAWAFERSDADVFLTVDSDTYIYPNALEELLKSFNDETVYAATGHLNARNRQTNLLTRLTDIRYDNAFGVERAAQSLTGNILVCSGPLSIYRREVIIPNLERYKNQTFLGLPVSIGDDRCLTNYAIDLGRTVYQSTARCDTDVPFQLKSYLKQQNRWNKSFFRESIISVKKILSNPIVALWTIFEVVMFMMLIVAIGNLLFNQAIQLDLIKLFAFLSIIFIVALXRNVHYMVKHPASFLLSPLYGILHLFVLQPLKLYSLXTIKNTEWGTRKKVTIFK

SEQ ID NO: 61 - protein, 419 aa, Streptococcus pyogenes
  MISC_FEATURE (225)..(225): Xaa = Ala, Ser or any other amino acid
  MISC_FEATURE (261)..(261): Xaa = Ala, Ser or any other amino acid
  MISC_FEATURE (280)..(280): Xaa = Ala, Ser or any other amino acid
MPIFKKTLIVLSFIFLISILIYLNMYLFGTSTVGIYGVILITYLVIKLGLSFLYEPFKGNPHDYKVAAVIPSYNEDAESLLETLKSVLAQTYPLSEIYIVDDGSSNTDAIQLIEEYVNREVDICRNVIVHRSLVNKGKRHAQAWAFERSDADVFLTVDSDTYIYPNALEELLKSFNDETVYAATGHLNARNRQTNLLTRLTDIRYDNAFGVERAAQSLTGNILVXSGPLSIYRREVIIPNLERYKNQTFLGLPVSIGDDRXLTNYAIDLGRTVYQSTARXDTDVPFQLKSYLKQQNRWNKSFFRESIISVKKILSNPIVALWTIFEVVMFMMLIVAIGNLLFNQAIQLDLIKLFAFLSIIFIVALCRNVHYMVKHPASFLLSPLYGILHLFVLQPLKLYSLCTIKNTEWGTRKKVTIFK

SEQ ID NO: 62 - protein, 419 aa, Streptococcus pyogenes
  MISC_FEATURE (225)..(225): Xaa = Ala, Ser or any other amino acid
  MISC_FEATURE (261)..(261): Xaa = Ala, Ser or any other amino acid
  MISC_FEATURE (366)..(366): Xaa = Ala, Ser or any other amino acid
MPIFKKTLIVLSFIFLISILIYLNMYLFGTSTVGIYGVILITYLVIKLGLSFLYEPFKGNPHDYKVAAVIPSYNEDAESLLETLKSVLAQTYPLSEIYIVDDGSSNTDAIQLIEEYVNREVDICRNVIVHRSLVNKGKRHAQAWAFERSDADVFLTVDSDTYIYPNALEELLKSFNDETVYAATGHLNARNRQTNLLTRLTDIRYDNAFGVERAAQSLTGNILVXSGPLSIYRREVIIPNLERYKNQTFLGLPVSIGDDRXLTNYAIDLGRTVYQSTARCDTDVPFQLKSYLKQQNRWNKSFFRESIISVKKILSNPIVALWTIFEVVMFMMLIVAIGNLLFNQAIQLDLIKLFAFLSIIFIVALXRNVHYMVKHPASFLLSPLYGILHLFVLQPLKLYSLCTIKNTEWGTRKKVTIFK

SEQ ID NO: 63 - protein, 419 aa, Streptococcus pyogenes
  MISC_FEATURE (225)..(225): Xaa = Ala, Ser or any other amino acid
  MISC_FEATURE (261)..(261): Xaa = Ala, Ser or any other amino acid
  MISC_FEATURE (402)..(402): Xaa = Ala, Ser or any other amino acid
MPIFKKTLIVLSFIFLISILIYLNMYLFGTSTVGIYGVILITYLVIKLGLSFLYEPFKGNPHDYKVAAVIPSYNEDAESLLETLKSVLAQTYPLSEIYIVDDGSSNTDAIQLIEEYVNREVDICRNVIVHRSLVNKGKRHAQAWAFERSDADVFLTVDSDTYIYPNALEELLKSFNDETVYAATGHLNARNRQTNLLTRLTDIRYDNAFGVERAAQSLTGNILVXSGPLSIYRREVIIPNLERYKNQTFLGLPVSIGDDRXLTNYAIDLGRTVYQSTARCDTDVPFQLKSYLKQQNRWNKSFFRESIISVKKILSNPIVALWTIFEVVMFMMLIVAIGNLLFNQAIQLDLIKLFAFLSIIFIVALCRNVHYMVKHPASFLLSPLYGILHLFVLQPLKLYSLXTIKNTEWGTRKKVTIFK

SEQ ID NO: 64 - protein, 419 aa, Streptococcus pyogenes
  MISC_FEATURE (225)..(225): Xaa = Ala, Ser or any other amino acid
  MISC_FEATURE (280)..(280): Xaa = Ala, Ser or any other amino acid
  MISC_FEATURE (366)..(366): Xaa = Ala, Ser or any other amino acid
MPIFKKTLIVLSFIFLISILIYLNMYLFGTSTVGIYGVILITYLVIKLGLSFLYEPFKGNPHDYKVAAVIPSYNEDAESLLETLKSVLAQTYPLSEIYIVDDGSSNTDAIQLIEEYVNREVDICRNVIVHRSLVNKGKRHAQAWAFERSDADVFLTVDSDTYIYPNALEELLKSFNDETVYAATGHLNARNRQTNLLTRLTDIRYDNAFGVERAAQSLTGNILVXSGPLSIYRREVIIPNLERYKNQTFLGLPVSIGDDRCLTNYAIDLGRTVYQSTARXDTDVPFQLKSYLKQQNRWNKSFFRESIISVKKILSNPIVALWTIFEVVMFMMLIVAIGNLLFNQAIQLDLIKLFAFLSIIFIVALXRNVHYMVKHPASFLLSPLYGILHLFVLQPLKLYSLCTIKNTEWGTRKKVTIFK

SEQ ID NO: 65 - protein, 419 aa, Streptococcus pyogenes
  MISC_FEATURE (225)..(225): Xaa = Ala, Ser or any other amino acid
  MISC_FEATURE (280)..(280): Xaa = Ala, Ser or any other amino acid
  MISC_FEATURE (402)..(402): Xaa = Ala, Ser or any other amino acid
MPIFKKTLIVLSFIFLISILIYLNMYLFGTSTVGIYGVILITYLVIKLGLSFLYEPFKGNPHDYKVAAVIPSYNEDAESLLETLKSVLAQTYPLSEIYIVDDGSSNTDAIQLIEEYVNREVDICRNVIVHRSLVNKGKRHAQAWAFERSDADVFLTVDSDTYIYPNALEELLKSFNDETVYAATGHLNARNRQTNLLTRLTDIRYDNAFGVERAAQSLTGNILVXSGPLSIYRREVIIPNLERYKNQTFLGLPVSIGDDRCLTNYAIDLGRTVYQSTARXDTDVPFQLKSYLKQQNRWNKSFFRESIISVKKILSNPIVALWTIFEVVMFMMLIVAIGNLLFNQAIQLDLIKLFAFLSIIFIVALCRNVHYMVKHPASFLLSPLYGILHLFVLQPLKLYSLXTIKNTEWGTRKKVTIFK

SEQ ID NO: 66 - protein, 419 aa, Streptococcus pyogenes
  MISC_FEATURE (225)..(225): Xaa = Ala, Ser or any other amino acid
  MISC_FEATURE (366)..(366): Xaa = Ala, Ser or any other amino acid
  MISC_FEATURE (402)..(402): Xaa = Ala, Ser or any other amino acid
MPIFKKTLIVLSFIFLISILIYLNMYLFGTSTVGIYGVILITYLVIKLGLSFLYEPFKGNPHDYKVAAVIPSYNEDAESLLETLKSVLAQTYPLSEIYIVDDGSSNTDAIQLIEEYVNREVDICRNVIVHRSLVNKGKRHAQAWAFERSDADVFLTVDSDTYIYPNALEELLKSFNDETVYAATGHLNARNRQTNLLTRLTDIRYDNAFGVERAAQSLTGNILVXSGPLSIYRREVIIPNLERYKNQTFLGLPVSIGDDRCLTNYAIDLGRTVYQSTARCDTDVPFQLKSYLKQQNRWNKSFFRESIISVKKILSNPIVALWTIFEVVMFMMLIVAIGNLLFNQAIQLDLIKLFAFLSIIFIVALXRNVHYMVKHPASFLLSPLYGILHLFVLQPLKLYSLXTIKNTEWGTRKKVTIFK

SEQ ID NO: 67 - protein, 419 aa, Streptococcus pyogenes
  MISC_FEATURE (261)..(261): Xaa = Ala, Ser or any other amino acid
  MISC_FEATURE (280)..(280): Xaa = Ala, Ser or any other amino acid
  MISC_FEATURE (366)..(366): Xaa = Ala, Ser or any other amino acid
MPIFKKTLIVLSFIFLISILIYLNMYLFGTSTVGIYGVILITYLVIKLGLSFLYEPFKGNPHDYKVAAVIPSYNEDAESLLETLKSVLAQTYPLSEIYIVDDGSSNTDAIQLIEEYVNREVDICRNVIVHRSLVNKGKRHAQAWAFERSDADVFLTVDSDTYIYPNALEELLKSFNDETVYAATGHLNARNRQTNLLTRLTDIRYDNAFGVERAAQSLTGNILVCSGPLSIYRREVIIPNLERYKNQTFLGLPVSIGDDRXLTNYAIDLGRTVYQSTARXDTDVPFQLKSYLKQQNRWNKSFFRESIISVKKILSNPIVALWTIFEVVMFMMLIVAIGNLLFNQAIQLDLIKLFAFLSIIFIVALXRNVHYMVKHPASFLLSPLYGILHLFVLQPLKLYSLCTIKNTEWGTRKKVTIFK

SEQ ID NO: 68 - protein, 419 aa, Streptococcus pyogenes
  MISC_FEATURE (261)..(261): Xaa = Ala, Ser or any other amino acid
  MISC_FEATURE (280)..(280): Xaa = Ala, Ser or any other amino acid
  MISC_FEATURE (402)..(402): Xaa = Ala, Ser or any other amino acid
MPIFKKTLIVLSFIFLISILIYLNMYLFGTSTVGIYGVILITYLVIKLGLSFLYEPFKGNPHDYKVAAVIPSYNEDAESLLETLKSVLAQTYPLSEIYIVDDGSSNTDAIQLIEEYVNREVDICRNVIVHRSLVNKGKRHAQAWAFERSDADVFLTVDSDTYIYPNALEELLKSFNDETVYAATGHLNARNRQTNLLTRLTDIRYDNAFGVERAAQSLTGNILVCSGPLSIYRREVIIPNLERYKNQTFLGLPVSIGDDRXLTNYAIDLGRTVYQSTARXDTDVPFQLKSYLKQQNRWNKSFFRESIISVKKILSNPIVALWTIFEVVMFMMLIVAIGNLLFNQAIQLDLIKLFAFLSIIFIVALCRNVHYMVKHPASFLLSPLYGILHLFVLQPLKLYSLXTIKNTEWGTRKKVTIFK

SEQ ID NO: 69 - protein, 419 aa, Streptococcus pyogenes
  MISC_FEATURE (261)..(261): Xaa = Ala, Ser or any other amino acid
  MISC_FEATURE (366)..(366): Xaa = Ala, Ser or any other amino acid
  MISC_FEATURE (402)..(402): Xaa = Ala, Ser or any other amino acid
MPIFKKTLIVLSFIFLISILIYLNMYLFGTSTVGIYGVILITYLVIKLGLSFLYEPFKGNPHDYKVAAVIPSYNEDAESLLETLKSVLAQTYPLSEIYIVDDGSSNTDAIQLIEEYVNREVDICRNVIVHRSLVNKGKRHAQAWAFERSDADVFLTVDSDTYIYPNALEELLKSFNDETVYAATGHLNARNRQTNLLTRLTDIRYDNAFGVERAAQSLTGNILVCSGPLSIYRREVIIPNLERYKNQTFLGLPVSIGDDRXLTNYAIDLGRTVYQSTARCDTDVPFQLKSYLKQQNRWNKSFFRESIISVKKILSNPIVALWTIFEVVMFMMLIVAIGNLLFNQAIQLDLIKLFAFLSIIFIVALXRNVHYMVKHPASFLLSPLYGILHLFVLQPLKLYSLXTIKNTEWGTRKKVTIFK

SEQ ID NO: 70 - protein, 419 aa, Streptococcus pyogenes
  MISC_FEATURE (280)..(280): Xaa = Ala, Ser or any other amino acid
  MISC_FEATURE (366)..(366): Xaa = Ala, Ser or any other amino acid
  MISC_FEATURE (402)..(402): Xaa = Ala, Ser or any other amino acid
MPIFKKTLIVLSFIFLISILIYLNMYLFGTSTVGIYGVILITYLVIKLGLSFLYEPFKGNPHDYKVAAVIPSYNEDAESLLETLKSVLAQTYPLSEIYIVDDGSSNTDAIQLIEEYVNREVDICRNVIVHRSLVNKGKRHAQAWAFERSDADVFLTVDSDTYIYPNALEELLKSFNDETVYAATGHLNARNRQTNLLTRLTDIRYDNAFGVERAAQSLTGNILVCSGPLSIYRREVIIPNLERYKNQTFLGLPVSIGDDRCLTNYAIDLGRTVYQSTARXDTDVPFQLKSYLKQQNRWNKSFFRESIISVKKILSNPIVALWTIFEVVMFMMLIVAIGNLLFNQAIQLDLIKLFAFLSIIFIVALXRNVHYMVKHPASFLLSPLYGILHLFVLQPLKLYSLXTIKNTEWGTRKKVTIFK

SEQ ID NO: 71 - protein, 419 aa, Streptococcus pyogenes
  MISC_FEATURE (124)..(124): Xaa = Ala, Ser or any other amino acid
  MISC_FEATURE (225)..(225): Xaa = Ala, Ser or any other amino acid
  MISC_FEATURE (261)..(261): Xaa = Ala, Ser or any other amino acid
  MISC_FEATURE (280)..(280): Xaa = Ala, Ser or any other amino acid
MPIFKKTLIVLSFIFLISILIYLNMYLFGTSTVGIYGVILITYLVIKLGLSFLYEPFKGNPHDYKVAAVIPSYNEDAESLLETLKSVLAQTYPLSEIYIVDDGSSNTDAIQLIEEYVNREVDIXRNVIVHRSLVNKGKRHAQAWAFERSDADVFLTVDSDTYIYPNALEELLKSFNDETVYAATGHLNARNRQTNLLTRLTDIRYDNAFGVERAAQSLTGNILVXSGPLSIYRREVIIPNLERYKNQTFLGLPVSIGDDRXLTNYAIDLGRTVYQSTARXDTDVPFQLKSYLKQQNRWNKSFFRESIISVKKILSNPIVALWTIFEVVMFMMLIVAIGNLLFNQAIQLDLIKLFAFLSIIFIVALCRNVHYMVKHPASFLLSPLYGILHLFVLQPLKLYSLCTIKNTEWGTRKKVTIFK

SEQ ID NO: 72 - protein, 419 aa, Streptococcus pyogenes
  MISC_FEATURE (124)..(124): Xaa = Ala, Ser or any other amino acid
  MISC_FEATURE (225)..(225): Xaa = Ala, Ser or any other amino acid
  MISC_FEATURE (261)..(261): Xaa = Ala, Ser or any other amino acid
  MISC_FEATURE (366)..(366): Xaa = Ala, Ser or any other amino acid
MPIFKKTLIVLSFIFLISILIYLNMYLFGTSTVGIYGVILITYLVIKLGLSFLYEPFKGNPHDYKVAAVIPSYNEDAESLLETLKSVLAQTYPLSEIYIVDDGSSNTDAIQLIEEYVNREVDIXRNVIVHRSLVNKGKRHAQAWAFERSDADVFLTVDSDTYIYPNALEELLKSFNDETVYAATGHLNARNRQTNLLTRLTDIRYDNAFGVERAAQSLTGNILVXSGPLSIYRREVIIPNLERYKNQTFLGLPVSIGDDRXLTNYAIDLGRTVYQSTARCDTDVPFQLKSYLKQQNRWNKSFFRESIISVKKILSNPIVALWTIFEVVMFMMLIVAIGNLLFNQAIQLDLIKLFAFLSIIFIVALXRNVHYMVKHPASFLLSPLYGILHLFVLQPLKLYSLCTIKNTEWGTRKKVTIFK

SEQ ID NO: 73 - protein, 419 aa, Streptococcus pyogenes
  MISC_FEATURE (124)..(124): Xaa = Ala, Ser or any other amino acid
  MISC_FEATURE (225)..(225): Xaa = Ala, Ser or any other amino acid
  MISC_FEATURE (261)..(261): Xaa = Ala, Ser or any other amino acid
  MISC_FEATURE (402)..(402): Xaa = Ala, Ser or any other amino acid
MPIFKKTLIVLSFIFLISILIYLNMYLFGTSTVGIYGVILITYLVIKLGLSFLYEPFKGNPHDYKVAAVIPSYNEDAESLLETLKSVLAQTYPLSEIYIVDDGSSNTDAIQLIEEYVNREVDIXRNVIVHRSLVNKGKRHAQAWAFERSDADVFLTVDSDTYIYPNALEELLKSFNDETVYAATGHLNARNRQTNLLTRLTDIRYDNAFGVERAAQSLTGNILVXSGPLSIYRREVIIPNLERYKNQTFLGLPVSIGDDRXLTNYAIDLGRTVYQSTARCDTDVPFQLKSYLKQQNRWNKSFFRESIISVKKILSNPIVALWTIFEVVMFMMLIVAIGNLLFNQAIQLDLIKLFAFLSIIFIVALCRNVHYMVKHPASFLLSPLYGILHLFVLQPLKLYSLXTIKNTEWGTRKKVTIFK

SEQ ID NO: 74 - protein, 419 aa, Streptococcus pyogenes
  MISC_FEATURE (124)..(124): Xaa = Ala, Ser or any other amino acid
  MISC_FEATURE (225)..(225): Xaa = Ala, Ser or any other amino acid
  MISC_FEATURE (280)..(280): Xaa = Ala, Ser or any other amino acid
  MISC_FEATURE (366)..(366): Xaa = Ala, Ser or any other amino acid
MPIFKKTLIVLSFIFLISILIYLNMYLFGTSTVGIYGVILITYLVIKLGLSFLYEPFKGNPHDYKVAAVIPSYNEDAESLLETLKSVLAQTYPLSEIYIVDDGSSNTDAIQLIEEYVNREVDIXRNVIVHRSLVNKGKRHAQAWAFERSDADVFLTVDSDTYIYPNALEELLKSFNDETVYAATGHLNARNRQTNLLTRLTDIRYDNAFGVERAAQSLTGNILVXSGPLSIYRREVIIPNLERYKNQTFLGLPVSIGDDRCLTNYAIDLGRTVYQSTARXDTDVPFQLKSYLKQQNRWNKSFFRESIISVKKILSNPIVALWTIFEVVMFMMLIVAIGNLLFNQAIQLDLIKLFAFLSIIFIVALXRNVHYMVKHPASFLLSPLYGILHLFVLQPLKLYSLCTIKNTEWGTRKKVTIFK

SEQ ID NO: 75 - protein, 419 aa, Streptococcus pyogenes
  MISC_FEATURE (124)..(124): Xaa = Ala, Ser or any other amino acid
  MISC_FEATURE (225)..(225): Xaa = Ala, Ser or any other amino acid
  MISC_FEATURE (280)..(280): Xaa = Ala, Ser or any other amino acid
  MISC_FEATURE (402)..(402): Xaa = Ala, Ser or any other amino acid
MPIFKKTLIVLSFIFLISILIYLNMYLFGTSTVGIYGVILITYLVIKLGLSFLYEPFKGNPHDYKVAAVIPSYNEDAESLLETLKSVLAQTYPLSEIYIVDDGSSNTDAIQLIEEYVNREVDIXRNVIVHRSLVNKGKRHAQAWAFERSDADVFLTVDSDTYIYPNALEELLKSFNDETVYAATGHLNARNRQTNLLTRLTDIRYDNAFGVERAAQSLTGNILVXSGPLSIYRREVIIPNLERYKNQTFLGLPVSIGDDRCLTNYAIDLGRTVYQSTARXDTDVPFQLKSYLKQQNRWNKSFFRESIISVKKILSNPIVALWTIFEVVMFMMLIVAIGNLLFNQAIQLDLIKLFAFLSIIFIVALCRNVHYMVKHPASFLLSPLYGILHLFVLQPLKLYSLXTIKNTEWGTRKKVTIFK

SEQ ID NO: 76 - protein, 419 aa, Streptococcus pyogenes
  MISC_FEATURE (124)..(124): Xaa = Ala, Ser or any other amino acid
  MISC_FEATURE (225)..(225): Xaa = Ala, Ser or any other amino acid
  MISC_FEATURE (366)..(366): Xaa = Ala, Ser or any other amino acid
  MISC_FEATURE (402)..(402): Xaa = Ala, Ser or any other amino acid
MPIFKKTLIVLSFIFLISILIYLNMYLFGTSTVGIYGVILITYLVIKLGLSFLYEPFKGNPHDYKVAAVIPSYNEDAESLLETLKSVLAQTYPLSEIYIVDDGSSNTDAIQLIEEYVNREVDIXRNVIVHRSLVNKGKRHAQAWAFERSDADVFLTVDSDTYIYPNALEELLKSFNDETVYAATGHLNARNRQTNLLTRLTDIRYDNAFGVERAAQSLTGNILVXSGPLSIYRREVIIPNLERYKNQTFLGLPVSIGDDRCLTNYAIDLGRTVYQSTARCDTDVPFQLKSYLKQQNRWNKSFFRESIISVKKILSNPIVALWTIFEVVMFMMLIVAIGNLLFNQAIQLDLIKLFAFLSIIFIVALXRNVHYMVKHPASFLLSPLYGILHLFVLQPLKLYSLXTIKNTEWGTRKKVTIFK

SEQ ID NO: 77 - protein, 419 aa, Streptococcus pyogenes
  MISC_FEATURE (124)..(124): Xaa = Ala, Ser or any other amino acid
  MISC_FEATURE (261)..(261): Xaa = Ala, Ser or any other amino acid
  MISC_FEATURE (280)..(280): Xaa = Ala, Ser or any other amino acid
  MISC_FEATURE (366)..(366): Xaa = Ala, Ser or any other amino acid
MPIFKKTLIVLSFIFLISILIYLNMYLFGTSTVGIYGVILITYLVIKLGLSFLYEPFKGNPHDYKVAAVIPSYNEDAESLLETLKSVLAQTYPLSEIYIVDDGSSNTDAIQLIEEYVNREVDIXRNVIVHRSLVNKGKRHAQAWAFERSDADVFLTVDSDTYIYPNALEELLKSFNDETVYAATGHLNARNRQTNLLTRLTDIRYDNAFGVERAAQSLTGNILVCSGPLSIYRREVIIPNLERYKNQTFLGLPVSIGDDRXLTNYAIDLGRTVYQSTARXDTDVPFQLKSYLKQQNRWNKSFFRESIISVKKILSNPIVALWTIFEVVMFMMLIVAIGNLLFNQAIQLDLIKLFAFLSIIFIVALXRNVHYMVKHPASFLLSPLYGILHLFVLQPLKLYSLCTIKNTEWGTRKKVTIFK

SEQ ID NO: 78 - protein, 419 aa, Streptococcus pyogenes
  MISC_FEATURE (124)..(124): Xaa = Ala, Ser or any other amino acid
  MISC_FEATURE (261)..(261): Xaa = Ala, Ser or any other amino acid
  MISC_FEATURE (280)..(280): Xaa = Ala, Ser or any other amino acid
  MISC_FEATURE (402)..(402): Xaa = Ala, Ser or any other amino acid
MPIFKKTLIVLSFIFLISILIYLNMYLFGTSTVGIYGVILITYLVIKLGLSFLYEPFKGNPHDYKVAAVIPSYNEDAESLLETLKSVLAQTYPLSEIYIVDDGSSNTDAIQLIEEYVNREVDIXRNVIVHRSLVNKGKRHAQAWAFERSDADVFLTVDSDTYIYPNALEELLKSFNDETVYAATGHLNARNRQTNLLTRLTDIRYDNAFGVERAAQSLTGNILVCSGPLSIYRREVIIPNLERYKNQTFLGLPVSIGDDRXLTNYAIDLGRTVYQSTARXDTDVPFQLKSYLKQQNRWNKSFFRESIISVKKILSNPIVALWTIFEVVMFMMLIVAIGNLLFNQAIQLDLIKLFAFLSIIFIVALCRNVHYMVKHPASFLLSPLYGILHLFVLQPLKLYSLXTIKNTEWGTRKKVTIFK

SEQ ID NO: 79 - protein, 419 aa, Streptococcus pyogenes
  MISC_FEATURE (124)..(124): Xaa = Ala, Ser or any other amino acid
  MISC_FEATURE (261)..(261): Xaa = Ala, Ser or any other amino acid
  MISC_FEATURE (366)..(366): Xaa = Ala, Ser or any other amino acid
  MISC_FEATURE (402)..(402): Xaa = Ala, Ser or any other amino acid
MPIFKKTLIVLSFIFLISILIYLNMYLFGTSTVGIYGVILITYLVIKLGLSFLYEPFKGNPHDYKVAAVIPSYNEDAESLLETLKSVLAQTYPLSEIYIVDDGSSNTDAIQLIEEYVNREVDIXRNVIVHRSLVNKGKRHAQAWAFERSDADVFLTVDSDTYIYPNALEELLKSFNDETVYAATGHLNARNRQTNLLTRLTDIRYDNAFGVERAAQSLTGNILVCSGPLSIYRREVIIPNLERYKNQTFLGLPVSIGDDRXLTNYAIDLGRTVYQSTARCDTDVPFQLKSYLKQQNRWNKSFFRESIISVKKILSNPIVALWTIFEVVMFMMLIVAIGNLLFNQAIQLDLIKLFAFLSIIFIVALXRNVHYMVKHPASFLLSPLYGILHLFVLQPLKLYSLXTIKNTEWGTRKKVTIFK

SEQ ID NO: 80 - protein, 419 aa, Streptococcus pyogenes
  MISC_FEATURE (124)..(124): Xaa = Ala, Ser or any other amino acid
  MISC_FEATURE (280)..(280): Xaa = Ala, Ser or any other amino acid
  MISC_FEATURE (366)..(366): Xaa = Ala, Ser or any other amino acid
  MISC_FEATURE (402)..(402): Xaa = Ala, Ser or any other amino acid
MPIFKKTLIVLSFIFLISILIYLNMYLFGTSTVGIYGVILITYLVIKLGLSFLYEPFKGNPHDYKVAAVIPSYNEDAESLLETLKSVLAQTYPLSEIYIVDDGSSNTDAIQLIEEYVNREVDIXRNVIVHRSLVNKGKRHAQAWAFERSDADVFLTVDSDTYIYPNALEELLKSFNDETVYAATGHLNARNRQTNLLTRLTDIRYDNAFGVERAAQSLTGNILVCSGPLSIYRREVIIPNLERYKNQTFLGLPVSIGDDRCLTNYAIDLGRTVYQSTARXDTDVPFQLKSYLKQQNRWNKSFFRESIISVKKILSNPIVALWTIFEVVMFMMLIVAIGNLLFNQAIQLDLIKLFAFLSIIFIVALXRNVHYMVKHPASFLLSPLYGILHLFVLQPLKLYSLXTIKNTEWGTRKKVTIFK

SEQ ID NO: 81 - protein, 419 aa, Streptococcus pyogenes
  MISC_FEATURE (225)..(225): Xaa = Ala, Ser or any other amino acid
  MISC_FEATURE (261)..(261): Xaa = Ala, Ser or any other amino acid
  MISC_FEATURE (280)..(280): Xaa = Ala, Ser or any other amino acid
  MISC_FEATURE (366)..(366): Xaa = Ala, Ser or any other amino acid
MPIFKKTLIVLSFIFLISILIYLNMYLFGTSTVGIYGVILITYLVIKLGLSFLYEPFKGNPHDYKVAAVIPSYNEDAESLLETLKSVLAQTYPLSEIYIVDDGSSNTDAIQLIEEYVNREVDICRNVIVHRSLVNKGKRHAQAWAFERSDADVFLTVDSDTYIYPNALEELLKSFNDETVYAATGHLNARNRQTNLLTRLTDIRYDNAFGVERAAQSLTGNILVXSGPLSIYRREVIIPNLERYKNQTFLGLPVSIGDDRXLTNYAIDLGRTVYQSTARXDTDVPFQLKSYLKQQNRWNKSFFRESIISVKKILSNPIVALWTIFEVVMFMMLIVAIGNLLFNQAIQLDLIKLFAFLSIIFIVALXRNVHYMVKHPASFLLSPLYGILHLFVLQPLKLYSLCTIKNTEWGTRKKVTIFK

SEQ ID NO: 82 - protein, 419 aa, Streptococcus pyogenes
  MISC_FEATURE (225)..(225): Xaa = Ala, Ser or any other amino acid
  MISC_FEATURE (261)..(261): Xaa = Ala, Ser or any other amino acid
  MISC_FEATURE (280)..(280): Xaa = Ala, Ser or any other amino acid
  MISC_FEATURE (402)..(402): Xaa = Ala, Ser or any other amino acid
MPIFKKTLIVLSFIFLISILIYLNMYLFGTSTVGIYGVILITYLVIKLGLSFLYEPFKGNPHDYKVAAVIPSYNEDAESLLETLKSVLAQTYPLSEIYIVDDGSSNTDAIQLIEEYVNREVDICRNVIVHRSLVNKGKRHAQAWAFERSDADVFLTVDSDTYIYPNALEELLKSFNDETVYAATGHLNARNRQTNLLTRLTDIRYDNAFGVERAAQSLTGNILVXSGPLSIYRREVIIPNLERYKNQTFLGLPVSIGDDRXLTNYAIDLGRTVYQSTARXDTDVPFQLKSYLKQQNRWNKSFFRESIISVKKILSNPIVALWTIFEVVMFMMLIVAIGNLLFNQAIQLDLIKLFAFLSIIFIVALCRNVHYMVKHPASFLLSPLYGILHLFVLQPLKLYSLXTIKNTEWGTRKKVTIFK

SEQ ID NO: 83 - protein, 419 aa, Streptococcus pyogenes
  MISC_FEATURE (225)..(225): Xaa = Ala, Ser or any other amino acid
  MISC_FEATURE (261)..(261): Xaa = Ala, Ser or any other amino acid
  MISC_FEATURE (366)..(366): Xaa = Ala, Ser or any other amino acid
  MISC_FEATURE (402)..(402): Xaa = Ala, Ser or any other amino acid
MPIFKKTLIVLSFIFLISILIYLNMYLFGTSTVGIYGVILITYLVIKLGLSFLYEPFKGNPHDYKVAAVIPSYNEDAESLLETLKSVLAQTYPLSEIYIVDDGSSNTDAIQLIEEYVNREVDICRNVIVHRSLVNKGKRHAQAWAFERSDADVFLTVDSDTYIYPNALEELLKSFNDETVYAATGHLNARNRQTNLLTRLTDIRYDNAFGVERAAQSLTGNILVXSGPLSIYRREVIIPNLERYKNQTFLGLPVSIGDDRXLTNYAIDLGRTVYQSTARCDTDVPFQLKSYLKQQNRWNKSFFRESIISVKKILSNPIVALWTIFEVVMFMMLIVAIGNLLFNQAIQLDLIKLFAFLSIIFIVALXRNVHYMVKHPASFLLSPLYGILHLFVLQPLKLYSLXTIKNTEWGTRKKVTIFK

SEQ ID NO: 84 - protein, 419 aa, Streptococcus pyogenes
  MISC_FEATURE (225)..(225): Xaa = Ala, Ser or any other amino acid
  MISC_FEATURE (280)..(280): Xaa = Ala, Ser or any other amino acid
  MISC_FEATURE (366)..(366): Xaa = Ala, Ser or any other amino acid
  MISC_FEATURE (402)..(402): Xaa = Ala, Ser or any other amino acid
MPIFKKTLIVLSFIFLISILIYLNMYLFGTSTVGIYGVILITYLVIKLGLSFLYEPFKGNPHDYKVAAVIPSYNEDAESLLETLKSVLAQTYPLSEIYIVDDGSSNTDAIQLIEEYVNREVDICRNVIVHRSLVNKGKRHAQAWAFERSDADVFLTVDSDTYIYPNALEELLKSFNDETVYAATGHLNARNRQTNLLTRLTDIRYDNAFGVERAAQSLTGNILVXSGPLSIYRREVIIPNLERYKNQTFLGLPVSIGDDRCLTNYAIDLGRTVYQSTARXDTDVPFQLKSYLKQQNRWNKSFFRESIISVKKILSNPIVALWTIFEVVMFMMLIVAIGNLLFNQAIQLDLIKLFAFLSIIFIVALXRNVHYMVKHPASFLLSPLYGILHLFVLQPLKLYSLXTIKNTEWGTRKKVTIFK

SEQ ID NO: 85 - protein, 419 aa, Streptococcus pyogenes
  MISC_FEATURE (261)..(261): Xaa = Ala, Ser or any other amino acid
  MISC_FEATURE (280)..(280): Xaa = Ala, Ser or any other amino acid
  MISC_FEATURE (366)..(366): Xaa = Ala, Ser or any other amino acid
  MISC_FEATURE (402)..(402): Xaa = Ala, Ser or any other amino acid
MPIFKKTLIVLSFIFLISILIYLNMYLFGTSTVGIYGVILITYLVIKLGLSFLYEPFKGNPHDYKVAAVIPSYNEDAESLLETLKSVLAQTYPLSEIYIVDDGSSNTDAIQLIEEYVNREVDICRNVIVHRSLVNKGKRHAQAWAFERSDADVFLTVDSDTYIYPNALEELLKSFNDETVYAATGHLNARNRQTNLLTRLTDIRYDNAFGVERAAQSLTGNILVCSGPLSIYRREVIIPNLERYKNQTFLGLPVSIGDDRXLTNYAIDLGRTVYQSTARXDTDVPFQLKSYLKQQNRWNKSFFRESIISVKKILSNPIVALWTIFEVVMFMMLIVAIGNLLFNQAIQLDLIKLFAFLSIIFIVALXRNVHYMVKHPASFLLSPLYGILHLFVLQPLKLYSLXTIKNTEWGTRKKVTIFK

SEQ ID NO: 86 - protein, 419 aa, Streptococcus pyogenes
  MISC_FEATURE (124)..(124): Xaa = Ala, Ser or any other amino acid
  MISC_FEATURE (225)..(225): Xaa = Ala, Ser or any other amino acid
  MISC_FEATURE (261)..(261): Xaa = Ala, Ser or any other amino acid
  MISC_FEATURE (280)..(280): Xaa = Ala, Ser or any other amino acid
  MISC_FEATURE (366)..(366): Xaa = Ala, Ser or any other amino acid
MPIFKKTLIVLSFIFLISILIYLNMYLFGTSTVGIYGVILITYLVIKLGLSFLYEPFKGNPHDYKVAAVIPSYNEDAESLLETLKSVLAQTYPLSEIYIVDDGSSNTDAIQLIEEYVNREVDIXRNVIVHRSLVNKGKRHAQAWAFERSDADVFLTVDSDTYIYPNALEELLKSFNDETVYAATGHLNARNRQTNLLTRLTDIRYDNAFGVERAAQSLTGNILVXSGPLSIYRREVIIPNLERYKNQTFLGLPVSIGDDRXLTNYAIDLGRTVYQSTARXDTDVPFQLKSYLKQQNRWNKSFFRESIISVKKILSNPIVALWTIFEVVMFMMLIVAIGNLLFNQAIQLDLIKLFAFLSIIFIVALXRNVHYMVKHPASFLLSPLYGILHLFVLQPLKLYSLCTIKNTEWGTRKKVTIFK

SEQ ID NO: 87 - protein, 419 aa, Streptococcus pyogenes
  MISC_FEATURE (124)..(124): Xaa = Ala, Ser or any other amino acid
  MISC_FEATURE (225)..(225): Xaa = Ala, Ser or any other amino acid
  MISC_FEATURE (261)..(261): Xaa = Ala, Ser or any other amino acid
  MISC_FEATURE (280)..(280): Xaa = Ala, Ser or any other amino acid
  MISC_FEATURE (402)..(402): Xaa = Ala, Ser or any other amino acid
MPIFKKTLIVLSFIFLISILIYLNMYLFGTSTVGIYGVILITYLVIKLGLSFLYEPFKGNPHDYKVAAVIPSYNEDAESLLETLKSVLAQTYPLSEIYIVDDGSSNTDAIQLIEEYVNREVDIXRNVIVHRSLVNKGKRHAQAWAFERSDADVFLTVDSDTYIYPNALEELLKSFNDETVYAATGHLNARNRQTNLLTRLTDIRYDNAFGVERAAQSLTGNILVXSGPLSIYRREVIIPNLERYKNQTFLGLPVSIGDDRXLTNYAIDLGRTVYQSTARXDTDVPFQLKSYLKQQNRWNKSFFRESIISVKKILSNPIVALWTIFEVVMFMMLIVAIGNLLFNQAIQLDLIKLFAFLSIIFIVALCRNVHYMVKHPASFLLSPLYGILHLFVLQPLKLYSLXTIKNTEWGTRKKVTIFK

SEQ ID NO: 88 - protein, 419 aa, Streptococcus pyogenes
  MISC_FEATURE (124)..(124): Xaa = Ala, Ser or any other amino acid
  MISC_FEATURE (225)..(225): Xaa = Ala, Ser or any other amino acid
  MISC_FEATURE (261)..(261): Xaa = Ala, Ser or any other amino acid
  MISC_FEATURE (366)..(366): Xaa = Ala, Ser or any other amino acid
  MISC_FEATURE (402)..(402): Xaa = Ala, Ser or any other amino acid
MPIFKKTLIVLSFIFLISILIYLNMYLFGTSTVGIYGVILITYLVIKLGLSFLYEPFKGNPHDYKVAAVIPSYNEDAESLLETLKSVLAQTYPLSEIYIVDDGSSNTDAIQLIEEYVNREVDIXRNVIVHRSLVNKGKRHAQAWAFERSDADVFLTVDSDTYIYPNALEELLKSFNDETVYAATGHLNARNRQTNLLTRLTDIRYDNAFGVERAAQSLTGNILVXSGPLSIYRREVIIPNLERYKNQTFLGLPVSIGDDRXLTNYAIDLGRTVYQSTARCDTDVPFQLKSYLKQQNRWNKSFFRESIISVKKILSNPIVALWTIFEVVMFMMLIVAIGNLLFNQAIQLDLIKLFAFLSIIFIVALXRNVHYMVKHPASFLLSPLYGILHLFVLQPLKLYSLXTIKNTEWGTRKKVTIFK

SEQ ID NO: 89 - protein, 419 aa, Streptococcus pyogenes
  MISC_FEATURE (124)..(124): Xaa = Ala, Ser or any other amino acid
  MISC_FEATURE (225)..(225): Xaa = Ala, Ser or any other amino acid
  MISC_FEATURE (280)..(280): Xaa = Ala, Ser or any other amino acid
  MISC_FEATURE (366)..(366): Xaa = Ala, Ser or any other amino acid
  MISC_FEATURE (402)..(402): Xaa = Ala, Ser or any other amino acid
MPIFKKTLIVLSFIFLISILIYLNMYLFGTSTVGIYGVILITYLVIKLGLSFLYEPFKGNPHDYKVAAVIPSYNEDAESLLETLKSVLAQTYPLSEIYIVDDGSSNTDAIQLIEEYVNREVDIXRNVIVHRSLVNKGKRHAQAWAFERSDADVFLTVDSDTYIYPNALEELLKSFNDETVYAATGHLNARNRQTNLLTRLTDIRYDNAFGVERAAQSLTGNILVXSGPLSIYRREVIIPNLERYKNQTFLGLPVSIGDDRCLTNYAIDLGRTVYQSTARXDTDVPFQLKSYLKQQNRWNKSFFRESIISVKKILSNPIVALWTIFEVVMFMMLIVAIGNLLFNQAIQLDLIKLFAFLSIIFIVALXRNVHYMVKHPASFLLSPLYGILHLFVLQPLKLYSLXTIKNTEWGTRKKVTIFK

SEQ ID NO: 90 - protein, 419 aa, Streptococcus pyogenes
  MISC_FEATURE (124)..(124): Xaa = Ala, Ser or any other amino acid
  MISC_FEATURE (261)..(261): Xaa = Ala, Ser or any other amino acid
  MISC_FEATURE (280)..(280): Xaa = Ala, Ser or any other amino acid
  MISC_FEATURE (366)..(366): Xaa = Ala, Ser or any other amino acid
  MISC_FEATURE (402)..(402): Xaa = Ala, Ser or any other amino acid
MPIFKKTLIVLSFIFLISILIYLNMYLFGTSTVGIYGVILITYLVIKLGLSFLYEPFKGNPHDYKVAAVIPSYNEDAESLLETLKSVLAQTYPLSEIYIVDDGSSNTDAIQLIEEYVNREVDIXRNVIVHRSLVNKGKRHAQAWAFERSDADVFLTVDSDTYIYPNALEELLKSFNDETVYAATGHLNARNRQTNLLTRLTDIRYDNAFGVERAAQSLTGNILVCSGPLSIYRREVIIPNLERYKNQTFLGLPVSIGDDRXLTNYAIDLGRTVYQSTARXDTDVPFQLKSYLKQQNRWNKSFFRESIISVKKILSNPIVALWTIFEVVMFMMLIVAIGNLLFNQAIQLDLIKLFAFLSIIFIVALXRNVHYMVKHPASFLLSPLYGILHLFVLQPLKLYSLXTIKNTEWGTRKKVTIFK

SEQ ID NO: 91 - protein, 419 aa, Streptococcus pyogenes
  MISC_FEATURE (225)..(225): Xaa = Ala, Ser or any other amino acid
  MISC_FEATURE (261)..(261): Xaa = Ala, Ser or any other amino acid
  MISC_FEATURE (280)..(280): Xaa = Ala, Ser or any other amino acid
  MISC_FEATURE (366)..(366): Xaa = Ala, Ser or any other amino acid
  MISC_FEATURE (402)..(402): Xaa = Ala, Ser or any other amino acid
MPIFKKTLIVLSFIFLISILIYLNMYLFGTSTVGIYGVILITYLVIKLGLSFLYEPFKGNPHDYKVAAVIPSYNEDAESLLETLKSVLAQTYPLSEIYIVDDGSSNTDAIQLIEEYVNREVDICRNVIVHRSLVNKGKRHAQAWAFERSDADVFLTVDSDTYIYPNALEELLKSFNDETVYAATGHLNARNRQTNLLTRLTDIRYDNAFGVERAAQSLTGNILVXSGPLSIYRREVIIPNLERYKNQTFLGLPVSIGDDRXLTNYAIDLGRTVYQSTARXDTDVPFQLKSYLKQQNRWNKSFFRESIISVKKILSNPIVALWTIFEVVMFMMLIVAIGNLLFNQAIQLDLIKLFAFLSIIFIVALXRNVHYMVKHPASFLLSPLYGILHLFVLQPLKLYSLXTIKNTEWGTRKKVTIFK

SEQ ID NO: 92 - protein, 419 aa, Streptococcus pyogenes
  MISC_FEATURE (124)..(124): Xaa = Ala, Ser or any other amino acid
  MISC_FEATURE (225)..(225): Xaa = Ala, Ser or any other amino acid
  MISC_FEATURE (261)..(261): Xaa = Ala, Ser or any other amino acid
  MISC_FEATURE (280)..(280): Xaa = Ala, Ser or any other amino acid
  MISC_FEATURE (366)..(366): Xaa = Ala, Ser or any other amino acid
  MISC_FEATURE (402)..(402): Xaa = Ala, Ser or any other amino acid
MPIFKKTLIVLSFIFLISILIYLNMYLFGTSTVGIYGVILITYLVIKLGLSFLYEPFKGNPHDYKVAAVIPSYNEDAESLLETLKSVLAQTYPLSEIYIVDDGSSNTDAIQLIEEYVNREVDIXRNVIVHRSLVNKGKRHAQAWAFERSDADVFLTVDSDTYIYPNALEELLKSFNDETVYAATGHLNARNRQTNLLTRLTDIRYDNAFGVERAAQSLTGNILVXSGPLSIYRREVIIPNLERYKNQTFLGLPVSIGDDRXLTNYAIDLGRTVYQSTARXDTDVPFQLKSYLKQQNRWNKSFFRESIISVKKILSNPIVALWTIFEVVMFMMLIVAIGNLLFNQAIQLDLIKLFAFLSIIFIVALXRNVHYMVKHPASFLLSPLYGILHLFVLQPLKLYSLXTIKNTEWGTRKKVTIFK

SEQ ID NO: 93 - protein, 417 aa, Streptococcus equisimilis
MRTLKNLITVVAFSIFWVLLIYVNVYLFGAKGSLSIYGFLLIAYLLVKMSLSFFYKPFKGRAGQYKVAAIIPSYNEDAESLLETLKSVQQQTYPLAEIYVVDDGSADETGIKRIEDYVRDTGDLSSNVIVHRSEKNQGKRHAQAWAFERSDADVFLTVDSDTYIYPDALEELLKTFNDPTVFAATGHLNVRNRQTNLLTRLTDIRYDNAFGVERAAQSVTGNILVCSGPLSVYRREVVVPNIDRYINQTFLGIPVSIGDDRCLTNYATDLGKTVYQSTAKCITDVPDKMSTYLKQQNRWNKSFFRESIISVKKIMNNPFVALWTILQVSMFMMLVYSVVDFFVGNVREFDWLRVLAFLVIIFIVALCRNIHYMLKHPLSFLLSPFYGVLHLFVLQPLKLYSLFTIRNADWGTRKKLL

SEQ ID NO: 94 - protein, 417 aa, Streptococcus equisimilis
MRTLKNLITVVAFSIFWVLLIYVNVYLFGAKGSLSIYGFLLIAYLLVKMSLSFFYKPFKGRAGQYKVAAIIPSYNEDAESLLETLKSVQQQTYPLAEIYVVDDGSADETGIKRIEDYVRDTGDLSSNVIVHRSEKNQGKRHAQAWAFERSDADVFLTVDSDTYIYPDALEELLKTFNDPTVFAATGHLNVRNRQTNLLTRLTDIRYDNAFGVERAAQSVTGNILVCSGPLSVYRREVVVPNIDRYINQTFLGIPVSIGDDRCLTNYATDLGKTVYQSTAKCITDVPDKMSTYLKQQNRWNKSFFRESIISVKKIMNNPFVALWTILDVSMFMMLVYSVVDFFVGNVREFDWLRVLAFLVIIFIVALCRNIHYMLKHPLSFLLSPFYGVLHLFVLQPLKLYSLFTIRNADWGTRKKLL

SEQ ID NO: 95 - protein, 417 aa, Streptococcus equisimilis
MRTLKNLITVVAFSIFWVLLIYVNVYLFGAKGSLSIYGFLLIAYLLVKMSLSFFYKPFKGRAGQYKVAAIIPSYNEDAESLLETLKSVQQQTYPLAEIYVVDDGSADETGIKRIEDYVRDTGDLSSNVIVHRSEKNQGKRHAQAWAFERSDADVFLTVDSDTYIYPDALEELLKTFNDPTVFAATGHLNVRNRQTNLLTRLTDIRYDNAFGVERAAQSVTGNILVCSGPLSVYRREVVVPNIDRYINQTFLGIPVSIGDDRCLTNYATDLGKTVYQSTAKCITDVPDKMSTYLKQQNRWNKSFFRESIISVKKIMNNPFVALWTILKVSMFMMLVYSVVDFFVGNVREFDWLRVLAFLVIIFIVALCRNIHYMLKHPLSFLLSPFYGVLHLFVLQPLKLYSLFTIRNADWGTRKKLL

SEQ ID NO: 96 - protein, 417 aa, Streptococcus equisimilis
MRTLKNLITVVAFSIFWVLLIYVNVYLFGAKGSLSIYGFLLIAYLLVRMSLSFFYKPFKGRAGQYKVAAIIPSYNEDAESLLETLKSVQQQTYPLAEIYVVDDGSADETGIKRIEDYVRDTGDLSSNVIVHRSEKNQGKRHAQAWAFERSDADVFLTVDSDTYIYPDALEELLKTFNDPTVFAATGHLNVRNRQTNLLTRLTDIRYDNAFGVERAAQSVTGNILVCSGPLSVYRREVVVPNIDRYINQTFLGIPVSIGDDRCLTNYATDLGKTVYQSTAKCITDVPDKMSTYLKQQNRWNKSFFRESIISVKKIMNNPFVALWTILEVSMFMMLVYSVVDFFVGNVREFDWLRVLAFLVIIFIVALCRNIHYMLKHPLSFLLSPFYGVLHLFVLQPLKLYSLFTIRNADWGTRKKLL

SEQ ID NO: 97 - protein, 417 aa, Streptococcus equisimilis
MRTLKNLITVVAFSIFWVLLIYVNVYLFGAKGSLSIYGFLLIAYLLVEMSLSFFYKPFKGRAGQYKVAAIIPSYNEDAESLLETLKSVQQQTYPLAEIYVVDDGSADETGIKRIEDYVRDTGDLSSNVIVHRSEKNQGKRHAQAWAFERSDADVFLTVDSDTYIYPDALEELLKTFNDPTVFAATGHLNVRNRQTNLLTRLTDIRYDNAFGVERAAQSVTGNILVCSGPLSVYRREVVVPNIDRYINQTFLGIPVSIGDDRCLTNYATDLGKTVYQSTAKCITDVPDKMSTYLKQQNRWNKSFFRESIISVKKIMNNPFVALWTILEVSMFMMLVYSVVDFFVGNVREFDWLRVLAFLVIIFIVALCRNIHYMLKHPLSFLLSPFYGVLHLFVLQPLKLYSLFTIRNADWGTRKKLL

SEQ ID NO: 98 - protein, 417 aa, Streptococcus equisimilis
MRTLKNLITVVAFSIFWVLLIYVNVYLFGAKGSLSIYGFLLIAYLLVEMSLSFFYKPFKGRAGQYKVAAIIPSYNEDAESLLETLKSVQQQTYPLAEIYVVDDGSADETGIKRIEDYVRDTGDLSSNVIVHRSEKNQGKRHAQAWAFERSDADVFLTVDSDTYIYPDALEELLKTFNDPTVFAATGHLNVRNRQTNLLTRLTDIRYDNAFGVERAAQSVTGNILVCSGPLSVYRREVVVPNIDRYINQTFLGIPVSIGDDRCLTNYATDLGKTVYQSTAKCITDVPDKMSTYLKQQNRWNKSFFRESIISVKKIMNNPFVALWTILKVSMFMMLVYSVVDFFVGNVREFDWLRVLAFLVIIFIVALCRNIHYMLKHPLSFLLSPFYGVLHLFVLQPLKLYSLFTIRNADWGTRKKLL

SEQ ID NO: 99 - protein, 417 aa, Streptococcus equisimilis
MRTLKNLITVVAFSIFWVLLIYVNVYLFGAKGSLSIYGFLLIAYLLVKMSFFFFYKPFKGRAGQYKVAAIIPSYNEDAESLLETLKSVQQQTYPLAEIYVVDDGSADETGIKRIEDYVRDTGDLSSNVIVHRSEKNQGKRHAQAWAFERSDADVFLTVDSDTYIYPDALEELLKTFNDPTVFAATGHLNVRNRQTNLLTRLTDIRYDNAFGVERAAQSVTGNILVCSGPLSVYRREVVVPNIDRYINQTFLGIPVSIGDDRCLTNYATDLGKTVYQSTAKCITDVPDKMSTYLKQQNRWNKSFFRESIISVKKIMNNPFVALWTILEVSMFMMLVYSVVDFFVGNVREFDWLRVLAFLVIIFIVALCRNIHYMLKHPLSFLLSPFYGVLHLFVLQPLKLYSLFTIRNADWGTRKKLL

SEQ ID NO: 100 - protein, 417 aa, Streptococcus equisimilis
MRTLKNLITVVAFSIFWVLLIYVNVYLFGAKGSLSIYGFLLIAYLLVKMSFFIFYKPFKGRAGQYKVAAIIPSYNEDAESLLETLKSVQQQTYPLAEIYVVDDGSADETGIKRIEDYVRDTGDLSSNVIVHRSEKNQGKRHAQAWAFERSDADVFLTVDSDTYIYPDALEELLKTFNDPTVFAATGHLNVRNRQTNLLTRLTDIRYDNAFGVERAAQSVTGNILVCSGPLSVYRREVVVPNIDRYINQTFLGIPVSIGDDRCLTNYATDLGKTVYQSTAKCITDVPDKMSTYLKQQNRWNKSFFRESIISVKKIMNNPFVALWTILEVSMFMMLVYSVVDFFVGNVREFDWLRVLAFLVIIFIVALCRNIHYMLKHPLSFLLSPFYGVLHLFVLQPLKLYSLFTIRNADWGTRKKLL

SEQ ID NO: 101 - protein, 417 aa, Streptococcus equisimilis
MRTLKNLITVVAFSIFWVLLIYVNVYLFGAKGSLSIYGFLLIAYLLVKMSFLTFYKPFKGRAGQYKVAAIIPSYNEDAESLLETLKSVQQQTYPLAEIYVVDDGSADETGIKRIEDYVRDTGDLSSNVIVHRSEKNQGKRHAQAWAFERSDADVFLTVDSDTYIYPDALEELLKTFNDPTVFAATGHLNVRNRQTNLLTRLTDIRYDNAFGVERAAQSVTGNILVCSGPLSVYRREVVVPNIDRYINQTFLGIPVSIGDDRCLTNYATDLGKTVYQSTAKCITDVPDKMSTYLKQQNRWNKSFFRESIISVKKIMNNPFVALWTILEVSMFMMLVYSVVDFFVGNVREFDWLRVLAFLVIIFIVALCRNIHYMLKHPLSFLLSPFYGVLHLFVLQPLKLYSLFTIRNADWGTRKKLL

SEQ ID NO: 102 - protein, 417 aa, Streptococcus equisimilis
MRTLKNLITVVAFSIFWVLLIYVNVYLFGAKGSLSIYGFLLIAYLLVKMSFTLFYKPFKGRAGQYKVAAIIPSYNEDAESLLETLKSVQQQTYPLAEIYVVDDGSADETGIKRIEDYVRDTGDLSSNVIVHRSEKNQGKRHAQAWAFERSDADVFLTVDSDTYIYPDALEELLKTFNDPTVFAATGHLNVRNRQTNLLTRLTDIRYDNAFGVERAAQSVTGNILVCSGPLSVYRREVVVPNIDRYINQTFLGIPVSIGDDRCLTNYATDLGKTVYQSTAKCITDVPDKMSTYLKQQNRWNKSFFRESIISVKKIMNNPFVALWTILEVSMFMMLVYSVVDFFVGNVREFDWLRVLAFLVIIFIVALCRNIHYMLKHPLSFLLSPFYGVLHLFVLQPLKLYSLFTIRNADWGTRKKLL

SEQ ID NO: 103 - protein, 417 aa, Streptococcus equisimilis
MRTLKNLITVVAFSIFWVLLIYVNVYLFGAKGSLSIYGFLLIAYLLVKMSFTTFYKPFKGRAGQYKVAAIIPSYNEDAESLLETLKSVQQQTYPLAEIYVVDDGSADETGIKRIEDYVRDTGDLSSNVIVHRSEKNQGKRHAQAWAFERSDADVFLTVDSDTYIYPDALEELLKTFNDPTVFAATGHLNVRNRQTNLLTRLTDIRYDNAFGVERAAQSVTGNILVCSGPLSVYRREVVVPNIDRYINQTFLGIPVSIGDDRCLTNYATDLGKTVYQSTAKCITDVPDKMSTYLKQQNRWNKSFFRESIISVKKIMNNPFVALWTILEVSMFMMLVYSVVDFFVGNVREFDWLRVLAFLVIIFIVALCRNIHYMLKHPLSFLLSPFYGVLHLFVLQPLKLYSLFTIRNADWGTRKKLL

SEQ ID NO: 104 - protein, 417 aa, Streptococcus equisimilis
MRTLKNLITVVAFSIFWVLLIYVNVYLFGAKGSLSIYGFLLIAYLLVKMSIISFYKPFKGRAGQYKVAAIIPSYNEDAESLLETLKSVQQQTYPLAEIYVVDDGSADETGIKRIEDYVRDTGDLSSNVIVHRSEKNQGKRHAQAWAFERSDADVFLTVDSDTYIYPDALEELLKTFNDPTVFAATGHLNVRNRQTNLLTRLTDIRYDNAFGVERAAQSVTGNILVCSGPLSVYRREVVVPNIDRYINQTFLGIPVSIGDDRCLTNYATDLGKTVYQSTAKCITDVPDKMSTYLKQQNRWNKSFFRESIISVKKIMNNPFVALWTILEVSMFMMLVYSVVDFFVGNVREFDWLRVLAFLVIIFIVALCRNIHYMLKHPLSFLLSPFYGVLHLFVLQPLKLYSLFTIRNADWGTRKKLL

SEQ ID NO: 105 - protein, 417 aa, Streptococcus equisimilis
MRTLKNLITVVAFSIFWVLLIYVNVYLFGAKGSLSIYGFLLIAYLLVKMSILFFYKPFKGRAGQYKVAAIIPSYNEDAESLLETLKSVQQQTYPLAEIYVVDDGSADETGIKRIEDYVRDTGDLSSNVIVHRSEKNQGKRHAQAWAFERSDADVFLTVDSDTYIYPDALEELLKTFNDPTVFAATGHLNVRNRQTNLLTRLTDIRYDNAFGVERAAQSVTGNILVCSGPLSVYRREVVVPNIDRYINQTFLGIPVSIGDDRCLTNYATDLGKTVYQSTAKCITDVPDKMSTYLKQQNRWNKSFFRESIISVKKIMNNPFVALWTILEVSMFMMLVYSVVDFFVGNVREFDWLRVLAFLVIIFIVALCRNIHYMLKHPLSFLLSPFYGVLHLFVLQPLKLYSLFTIRNADWGTRKKLL

SEQ ID NO: 106 - protein, 417 aa, Streptococcus equisimilis
MRTLKNLITVVAFSIFWVLLIYVNVYLFGAKGSLSIYGFLLIAYLLVKMSISFFYKPFKGRAGQYKVAAIIPSYNEDAESLLETLKSVQQQTYPLAEIYVVDDGSADETGIKRIEDYVRDTGDLSSNVIVHRSEKNQGKRHAQAWAFERSDADVFLTVDSDTYIYPDALEELLKTFNDPTVFAATGHLNVRNRQTNLLTRLTDIRYDNAFGVERAAQSVTGNILVCSGPLSVYRREVVVPNIDRYINQTFLGIPVSIGDDRCLTNYATDLGKTVYQSTAKCITDVPDKMSTYLKQQNRWNKSFFRESIISVKKIMNNPFVALWTILEVSMFMMLVYSVVDFFVGNVREFDWLRVLAFLVIIFIVALCRNIHYMLKHPLSFLLSPFYGVLHLFVLQPLKLYSLFTIRNADWGTRKKLL

SEQ ID NO: 107 - protein, 417 aa, Streptococcus equisimilis
MRTLKNLITVVAFSIFWVLLIYVNVYLFGAKGSLSIYGFLLIAYLLVKMSISIFYKPFKGRAGQYKVAAIIPSYNEDAESLLETLKSVQQQTYPLAEIYVVDDGSADETGIKRIEDYVRDTGDLSSNVIVHRSEKNQGKRHAQAWAFERSDADVFLTVDSDTYIYPDALEELLKTFNDPTVFAATGHLNVRNRQTNLLTRLTDIRYDNAFGVERAAQSVTGNILVCSGPLSVYRREVVVPNIDRYINQTFLGIPVSIGDDRCLTNYATDLGKTVYQSTAKCITDVPDKMSTYLKQQNRWNKSFFRESIISVKKIMNNPFVALWTILEVSMFMMLVYSVVDFFVGNVREFDWLRVLAFLVIIFIVALCRNIHYMLKHPLSFLLSPFYGVLHLFVLQPLKLYSLFTIRNADWGTRKKLL

SEQ ID NO: 108 - protein, 417 aa, Streptococcus equisimilis
MRTLKNLITVVAFSIFWVLLIYVNVYLFGAKGSLSIYGFLLIAYLLVKMSISLFYKPFKGRAGQYKVAAIIPSYNEDAESLLETLKSVQQQTYPLAEIYVVDDGSADETGIKRIEDYVRDTGDLSSNVIVHRSEKNQGKRHAQAWAFERSDADVFLTVDSDTYIYPDALEELLKTFNDPTVFAATGHLNVRNRQTNLLTRLTDIRYDNAFGVERAAQSVTGNILVCSGPLSVYRREVVVPNIDRYINQTFLGIPVSIGDDRCLTNYATDLGKTVYQSTAKCITDVPDKMSTYLKQQNRWNKSFFRESIISVKKIMNNPFVALWTILEVSMFMMLVYSVVDFFVGNVREFDWLRVLAFLVIIFIVALCRNIHYMLKHPLSFLLSPFYGVLHLFVLQPLKLYSLFTIRNADWGTRKKLL

SEQ ID NO: 109 - protein, 417 aa, Streptococcus equisimilis
MRTLKNLITVVAFSIFWVLLIYVNVYLFGAKGSLSIYGFLLIAYLLVKMSISSFYKPFKGRAGQYKVAAIIPSYNEDAESLLETLKSVQQQTYPLAEIYVVDDGSADETGIKRIEDYVRDTGDLSSNVIVHRSEKNQGKRHAQAWAFERSDADVFLTVDSDTYIYPDALEELLKTFNDPTVFAATGHLNVRNRQTNLLTRLTDIRYDNAFGVERAAQSVTGNILVCSGPLSVYRREVVVPNIDRYINQTFLGIPVSIGDDRCLTNYATDLGKTVYQSTAKCITDVPDKMSTYLKQQNRWNKSFFRESIISVKKIMNNPFVALWTILEVSMFMMLVYSVVDFFVGNVREFDWLRVLAFLVIIFIVALCRNIHYMLKHPLSFLLSPFYGVLHLFVLQPLKLYSLFTIRNADWGTRKKLL

SEQ ID NO: 110 - protein, 417 aa, Streptococcus equisimilis
MRTLKNLITVVAFSIFWVLLIYVNVYLFGAKGSLSIYGFLLIAYLLVKMSISTFYKPFKGRAGQYKVAAIIPSYNEDAESLLETLKSVQQQTYPLAEIYVVDDGSADETGIKRIEDYVRDTGDLSSNVIVHRSEKNQGKRHAQAWAFERSDADVFLTVDSDTYIYPDALEELLKTFNDPTVFAATGHLNVRNRQTNLLTRLTDIRYDNAFGVERAAQSVTGNILVCSGPLSVYRREVVVPNIDRYINQTFLGIPVSIGDDRCLTNYATDLGKTVYQSTAKCITDVPDKMSTYLKQQNRWNKSFFRESIISVKKIMNNPFVALWTILEVSMFMMLVYSVVDFFVGNVREFDWLRVLAFLVIIFIVALCRNIHYMLKHPLSFLLSPFYGVLHLFVLQPLKLYSLFTIRNADWGTRKKLL

SEQ ID NO: 111 - protein, 417 aa, Streptococcus equisimilis
MRTLKNLITVVAFSIFWVLLIYVNVYLFGAKGSLSIYGFLLIAYLLVKMSLILFYKPFKGRAGQYKVAAIIPSYNEDAESLLETLKSVQQQTYPLAEIYVVDDGSADETGIKRIEDYVRDTGDLSSNVIVHRSEKNQGKRHAQAWAFERSDADVFLTVDSDTYIYPDALEELLKTFNDPTVFAATGHLNVRNRQTNLLTRLTDIRYDNAFGVERAAQSVTGNILVCSGPLSVYRREVVVPNIDRYINQTFLGIPVSIGDDRCLTNYATDLGKTVYQSTAKCITDVPDKMSTYLKQQNRWNKSFFRESIISVKKIMNNPFVALWTILEVSMFMMLVYSVVDFFVGNVREFDWLRVLAFLVIIFIVALCRNIHYMLKHPLSFLLSPFYGVLHLFVLQPLKLYSLFTIRNADWGTRKKLL

SEQ ID NO: 112 - protein, 417 aa, Streptococcus equisimilis
MRTLKNLITVVAFSIFWVLLIYVNVYLFGAKGSLSIYGFLLIAYLLVKMSLSSFYKPFKGRAGQYKVAAIIPSYNEDAESLLETLKSVQQQTYPLAEIYVVDDGSADETGIKRIEDYVRDTGDLSSNVIVHRSEKNQGKRHAQAWAFERSDADVFLTVDSDTYIYPDALEELLKTFNDPTVFAATGHLNVRNRQTNLLTRLTDIRYDNAFGVERAAQSVTGNILVCSGPLSVYRREVVVPNIDRYINQTFLGIPVSIGDDRCLTNYATDLGKTVYQSTAKCITDVPDKMSTYLKQQNRWNKSFFRESIISVKKIMNNPFVALWTILEVSMFMMLVYSVVDFFVGNVREFDWLRVLAFLVIIFIVALCRNIHYMLKHPLSFLLSPFYGVLHLFVLQPLKLYSLFTIRNADWGTRKKLL

SEQ ID NO: 113 - protein, 417 aa, Streptococcus equisimilis
MRTLKNLITVVAFSIFWVLLIYVNVYLFGAKGSLSIYGFLLIAYLLVKMSLSTFYKPFKGRAGQYKVAAIIPSYNEDAESLLETLKSVQQQTYPLAEIYVVDDGSADETGIKRIEDYVRDTGDLSSNVIVHRSEKNQGKRHAQAWAFERSDADVFLTVDSDTYIYPDALEELLKTFNDPTVFAATGHLNVRNRQTNLLTRLTDIRYDNAFGVERAAQSVTGNILVCSGPLSVYRREVVVPNIDRYINQTFLGIPVSIGDDRCLTNYATDLGKTVYQSTAKCITDVPDKMSTYLKQQNRWNKSFFRESIISVKKIMNNPFVALWTILEVSMFMMLVYSVVDFFVGNVREFDWLRVLAFLVIIFIVALCRNIHYMLKHPLSFLLSPFYGVLHLFVLQPLKLYSLFTIRNADWGTRKKLL

SEQ ID NO: 114 - protein, 417 aa, Streptococcus equisimilis
MRTLKNLITVVAFSIFWVLLIYVNVYLFGAKGSLSIYGFLLIAYLLVKMSLTFFYKPFKGRAGQYKVAAIIPSYNEDAESLLETLKSVQQQTYPLAEIYVVDDGSADETGIKRIEDYVRDTGDLSSNVIVHRSEKNQGKRHAQAWAFERSDADVFLTVDSDTYIYPDALEELLKTFNDPTVFAATGHLNVRNRQTNLLTRLTDIRYDNAFGVERAAQSVTGNILVCSGPLSVYRREVVVPNIDRYINQTFLGIPVSIGDDRCLTNYATDLGKTVYQSTAKCITDVPDKMSTYLKQQNRWNKSFFRESIISVKKIMNNPFVALWTILEVSMFMMLVYSVVDFFVGNVREFDWLRVLAFLVIIFIVALCRNIHYMLKHPLSFLLSPFYGVLHLFVLQPLKLYSLFTIRNADWGTRKKLL

SEQ ID NO: 115 - protein, 417 aa, Streptococcus equisimilis
MRTLKNLITVVAFSIFWVLLIYVNVYLFGAKGSLSIYGFLLIAYLLVKMSLTTFYKPFKGRAGQYKVAAIIPSYNEDAESLLETLKSVQQQTYPLAEIYVVDDGSADETGIKRIEDYVRDTGDLSSNVIVHRSEKNQGKRHAQAWAFERSDADVFLTVDSDTYIYPDALEELLKTFNDPTVFAATGHLNVRNRQTNLLTRLTDIRYDNAFGVERAAQSVTGNILVCSGPLSVYRREVVVPNIDRYINQTFLGIPVSIGDDRCLTNYATDLGKTVYQSTAKCITDVPDKMSTYLKQQNRWNKSFFRESIISVKKIMNNPFVALWTILEVSMFMMLVYSVVDFFVGNVREFDWLRVLAFLVIIFIVALCRNIHYMLKHPLSFLLSPFYGVLHLFVLQPLKLYSLFTIRNADWGTRKKLL

SEQ ID NO: 116 - protein, 417 aa, Streptococcus equisimilis
MRTLKNLITVVAFSIFWVLLIYVNVYLFGAKGSLSIYGFLLIAYLLVKMSSFIFYKPFKGRAGQYKVAAIIPSYNEDAESLLETLKSVQQQTYPLAEIYVVDDGSADETGIKRIEDYVRDTGDLSSNVIVHRSEKNQGKRHAQAWAFERSDADVFLTVDSDTYIYPDALEELLKTFNDPTVFAATGHLNVRNRQTNLLTRLTDIRYDNAFGVERAAQSVTGNILVCSGPLSVYRREVVVPNIDRYINQTFLGIPVSIGDDRCLTNYATDLGKTVYQSTAKCITDVPDKMSTYLKQQNRWNKSFFRESIISVKKIMNNPFVALWTILEVSMFMMLVYSVVDFFVGNVREFDWLRVLAFLVIIFIVALCRNIHYMLKHPLSFLLSPFYGVLHLFVLQPLKLYSLFTIRNADWGTRKKLL

SEQ ID NO: 117 - protein, 417 aa, Streptococcus equisimilis
MRTLKNLITVVAFSIFWVLLIYVNVYLFGAKGSLSIYGFLLIAYLLVKMSSTIFYKPFKGRAGQYKVAAIIPSYNEDAESLLETLKSVQQQTYPLAEIYVVDDGSADETGIKRIEDYVRDTGDLSSNVIVHRSEKNQGKRHAQAWAFERSDADVFLTVDSDTYIYPDALEELLKTFNDPTVFAATGHLNVRNRQTNLLTRLTDIRYDNAFGVERAAQSVTGNILVCSGPLSVYRREVVVPNIDRYINQTFLGIPVSIGDDRCLTNYATDLGKTVYQSTAKCITDVPDKMSTYLKQQNRWNKSFFRESIISVKKIMNNPFVALWTILEVSMFMMLVYSVVDFFVGNVREFDWLRVLAFLVIIFIVALCRNIHYMLKHPLSFLLSPFYGVLHLFVLQPLKLYSLFTIRNADWGTRKKLL

SEQ ID NO: 118 - protein, 417 aa, Streptococcus equisimilis
MRTLKNLITVVAFSIFWVLLIYVNVYLFGAKGSLSIYGFLLIAYLLVKMSTISFYKPFKGRAGQYKVAAIIPSYNEDAESLLETLKSVQQQTYPLAEIYVVDDGSADETGIKRIEDYVRDTGDLSSNVIVHRSEKNQGKRHAQAWAFERSDADVFLTVDSDTYIYPDALEELLKTFNDPTVFAATGHLNVRNRQTNLLTRLTDIRYDNAFGVERAAQSVTGNILVCSGPLSVYRREVVVPNIDRYINQTFLGIPVSIGDDRCLTNYATDLGKTVYQSTAKCITDVPDKMSTYLKQQNRWNKSFFRESIISVKKIMNNPFVALWTILEVSMFMMLVYSVVDFFVGNVREFDWLRVLAFLVIIFIVALCRNIHYMLKHPLSFLLSPFYGVLHLFVLQPLKLYSLFTIRNADWGTRKKLL

SEQ ID NO: 119 - protein, 417 aa, Streptococcus equisimilis
MRTLKNLITVVAFSIFWVLLIYVNVYLFGAKGSLSIYGFLLIAYLLVKMSTITFYKPFKGRAGQYKVAAIIPSYNEDAESLLETLKSVQQQTYPLAEIYVVDDGSADETGIKRIEDYVRDTGDLSSNVIVHRSEKNQGKRHAQAWAFERSDADVFLTVDSDTYIYPDALEELLKTFNDPTVFAATGHLNVRNRQTNLLTRLTDIRYDNAFGVERAAQSVTGNILVCSGPLSVYRREVVVPNIDRYINQTFLGIPVSIGDDRCLTNYATDLGKTVYQSTAKCITDVPDKMSTYLKQQNRWNKSFFRESIISVKKIMNNPFVALWTILEVSMFMMLVYSVVDFFVGNVREFDWLRVLAFLVIIFIVALCRNIHYMLKHPLSFLLSPFYGVLHLFVLQPLKLYSLFTIRNADWGTRKKLL

SEQ ID NO: 120 - protein, 417 aa, Streptococcus equisimilis
MRTLKNLITVVAFSIFWVLLIYVNVYLFGAKGSLSIYGFLLIAYLLVKMSTSIFYKPFKGRAGQYKVAAIIPSYNEDAESLLETLKSVQQQTYPLAEIYVVDDGSADETGIKRIEDYVRDTGDLSSNVIVHRSEKNQGKRHAQAWAFERSDADVFLTVDSDTYIYPDALEELLKTFNDPTVFAATGHLNVRNRQTNLLTRLTDIRYDNAFGVERAAQSVTGNILVCSGPLSVYRREVVVPNIDRYINQTFLGIPVSIGDDRCLTNYATDLGKTVYQSTAKCITDVPDKMSTYLKQQNRWNKSFFRESIISVKKIMNNPFVALWTILEVSMFMMLVYSVVDFFVGNVREFDWLRVLAFLVIIFIVALCRNIHYMLKHPLSFLLSPFYGVLHLFVLQPLKLYSLFTIRNADWGTRKKLL

SEQ ID NO: 121 - protein, 417 aa, Streptococcus equisimilis
MRTLKNLITVVAFSIFWVLLIYVNVYLFGAKGSLSIYGFLLIAYLLVKMSTSLFYKPFKGRAGQYKVAAIIPSYNEDAESLLETLKSVQQQTYPLAEIYVVDDGSADETGIKRIEDYVRDTGDLSSNVIVHRSEKNQGKRHAQAWAFERSDADVFLTVDSDTYIYPDALEELLKTFNDPTVFAATGHLNVRNRQTNLLTRLTDIRYDNAFGVERAAQSVTGNILVCSGPLSVYRREVVVPNIDRYINQTFLGIPVSIGDDRCLTNYATDLGKTVYQSTAKCITDVPDKMSTYLKQQNRWNKSFFRESIISVKKIMNNPFVALWTILEVSMFMMLVYSVVDFFVGNVREFDWLRVLAFLVIIFIVALCRNIHYMLKHPLSFLLSPFYGVLHLFVLQPLKLYSLFTIRNADWGTRKKLL

SEQ ID NO: 122 - protein, 417 aa, Streptococcus equisimilis
MRTLKNLITVVAFSIFWVLLIYVNVYLFGAKGSLSIYGFLLIAYLLVKMSTSSFYKPFKGRAGQYKVAAIIPSYNEDAESLLETLKSVQQQTYPLAEIYVVDDGSADETGIKRIEDYVRDTGDLSSNVIVHRSEKNQGKRHAQAWAFERSDADVFLTVDSDTYIYPDALEELLKTFNDPTVFAATGHLNVRNRQTNLLTRLTDIRYDNAFGVERAAQSVTGNILVCSGPLSVYRREVVVPNIDRYINQTFLGIPVSIGDDRCLTNYATDLGKTVYQSTAKCITDVPDKMSTYLKQQNRWNKSFFRESIISVKKIMNNPFVALWTILEVSMFMMLVYSVVDFFVGNVREFDWLRVLAFLVIIFIVALCRNIHYMLKHPLSFLLSPFYGVLHLFVLQPLKLYSLFTIRNADWGTRKKLL

SEQ ID NO: 123 - protein, 417 aa, Streptococcus equisimilis
MRTLKNLITVVAFSIFWVLLIYVNVYLFGAKGSLSIYGFLLIAYLLVKMSTSTFYKPFKGRAGQYKVAAIIPSYNEDAESLLETLKSVQQQTYPLAEIYVVDDGSADETGIKRIEDYVRDTGDLSSNVIVHRSEKNQGKRHAQAWAFERSDADVFLTVDSDTYIYPDALEELLKTFNDPTVFAATGHLNVRNRQTNLLTRLTDIRYDNAFGVERAAQSVTGNILVCSGPLSVYRREVVVPNIDRYINQTFLGIPVSIGDDRCLTNYATDLGKTVYQSTAKCITDVPDKMSTYLKQQNRWNKSFFRESIISVKKIMNNPFVALWTILEVSMFMMLVYSVVDFFVGNVREFDWLRVLAFLVIIFIVALCRNIHYMLKHPLSFLLSPFYGVLHLFVLQPLKLYSLFTIRNADWGTRKKLL

SEQ ID NO: 124 - protein, 417 aa, Streptococcus equisimilis
MRTLKNLITVVAFSIFWVLLIYVNVYLFGAKGSLSIYGFLLIAYLLVKMSLSFFYKPFKGRAGQYKVAAIIPSYNEDAESLLETLKSVQQQTYPLAEIYVVDDGSADETGIKRIEDYVRDTGDLSSNVIVHRSEKNQGKRHAQAWAFERSDADVFLTVDSDTYIYPDALEELLKTFNDPTVFAATGHLNVRNRQTNLLTRLTDIRYDNAFGVERAAQSVTGNILVCSGPLSVYRREVVVPNIDRYINQTFLGIPVSIGDDRCLTNYATDLGKTVYQSTAKCITDVPDKMSTYLKQQNRWNKSFFRESIISVKKIMNNPFVALWTILEVSMFMMLVYSVVDFFVGNVRECDWLRVLAFLVIIFIVALCRNIHYMLKHPLSFLLSPFYGVLHLFVLQPLKLYSLFTIRNADWGTRKKLL

SEQ ID NO: 125 - protein, 417 aa, Streptococcus equisimilis
MRTLKNLITVVAFSIFWVLLIYVNVYLFGAKGSLSIYGFLLIAYLLVKMSLSFFYKPFKGRAGQYKVAAIIPSYNEDAESLLETLKSVQQQTYPLAEIYVVDDGSADETGIKRIEDYVRDTGDLSSNVIVHRSEKNQGKRHAQAWAFERSDADVFLTVDSDTYIYPDALEELLKTFNDPTVFAATGHLNVRNRQTNLLTRLTDIRYDNAFGVERAAQSVTGNILVCSGPLSVYRREVVVPNIDRYINQTFLGIPVSIGDDRCLTNYATDLGKTVYQSTAKCITDVPDKMSTYLKQQNRWNKSFFRESIISVKKIMNNPFVALWTILEVSMFMMLVYSVVDFFVGNVREDDWLRVLAFLVIIFIVALCRNIHYMLKHPLSFLLSPFYGVLHLFVLQPLKLYSLFTIRNADWGTRKKLL

SEQ ID NO: 126 - protein, 417 aa, Streptococcus equisimilis
MRTLKNLITVVAFSIFWVLLIYVNVYLFGAKGSLSIYGFLLIAYLLVKMSLSFFYKPFKGRAGQYKVAAIIPSYNEDAESLLETLKSVQQQTYPLAEIYVVDDGSADETGIKRIEDYVRDTGDLSSNVIVHRSEKNQGKRHAQAWAFERSDADVFLTVDSDTYIYPDALEELLKTFNDPTVFAATGHLNVRNRQTNLLTRLTDIRYDNAFGVERAAQSVTGNILVCSGPLSVYRREVVVPNIDRYINQTFLGIPVSIGDDRCLTNYATDLGKTVYQSTAKCITDVPDKMSTYLKQQNRWNKSFFRESIISVKKIMNNPFVALWTILEVSMFMMLVYSVVDFFVGNVREYDWLRVLAFLVIIFIVALCRNIHYMLKHPLSFLLSPFYGVLHLFVLQPLKLYSLFTIRNADWGTRKKLL

SEQ ID NO: 127 - protein, 417 aa, Streptococcus equisimilis
MRTLKNLITVVAFSIFWVLLIYVNVYLFGAKGSLSIYGFLLIAYLLVKMSLSFFYKPFKGRAGQYKVAAIIPSYNEDAESLLETLKSVQQQTYPLAEIYVVDDGSADETGIKRIEDYVRDTGDLSSNVIVHRSEKNQGKRHAQAWAFERSDADVFLTVDSDTYIYPDALEELLKTFNDPTVFAATGHLNVRNRQTNLLTRLTDIRYDNAFGVERAAQSVTGNILVCSGPLSVYRREVVVPNIDRYINQTFLGIPVSIGDDRCLTNYATDLGKTVYQSTAKCITDVPDKMSTYLKQQNRWNKSFFRESIISVKKIMNNPFVALWTILEVSMFMMLVYSVVDFFVGNVREGDWLRVLAFLVIIFIVALCRNIHYMLKHPLSFLLSPFYGVLHLFVLQPLKLYSLFTIRNADWGTRKKLL

SEQ ID NO: 128 - protein, 417 aa, Streptococcus equisimilis
MRTLKNLITVVAFSIFWVLLIYVNVYLFGATGSLSIYGFLLIAYLLVKMSLSFFYKPFKGRAGQYKVAAIIPSYNEDAESLLETLKSVQQQTYPLAEIYVVDDGSADETGIKRIEDYVRDTGDLSSNVIVHRSEKNQGKRHAQAWAFERSDADVFLTVDSDTYIYPDALEELLKTFNDPTVFAATGHLNVRNRQTNLLTRLTDIRYDNAFGVERAAQSVTGNILVCSGPLSVYRREVVVPNIDRYINQTFLGIPVSIGDDRCLTNYATDLGKTVYQSTAKCITDVPDKMSTYLKQQNRWNKSFFRESIISVKKIMNNPFVALWTILEVSMFMMLVYSVVDFFVGNVREFDWLRVLAFLVIIFIVALCRNIHYMLKHPLSFLLSPFYGVLHLFVLQPLKLYSLFTIRNADWGTRKKLL

SEQ ID NO: 129 - protein, 417 aa, Streptococcus equisimilis
MRTLKNLITVVAFSIFWVLLIYVNVYLFGATGSLSIYGFLLIAYLLVKMSLSFFYKPFKGRAGQYKVAAIIPSYNEDAESLLETLKSVQQQTYPLAEIYVVDDGSADETGIKRIEDYVRDTGDLSSNVIVHRSEKNQGKRHAQAWAFERSDADVFLTVDSDTYIYPDALEELLKTFNDPTVFAATGHLNVRNRQTNLLTRLTDIRYDNAFGVERAAQSVTGNILVCSGPLSVYRREVVVPNIDRYINQTFLGIPVSIGDDRCLTNYATDLGKTVYQSTAKCITDVPDKMSTYLKQQNRWNKSFFRESIISVKKIMNNPFVALWTILEVSMFMMLVYSVVDFFVGNVREGDWLRVLAFLVIIFIVALCRNIHYMLKHPLSFLLSPFYGVLHLFVLQPLKLYSLFTIRNADWGTRKKLL

SEQ ID NO: 130 - protein, 417 aa, Streptococcus equisimilis
MRTLKNLITVVAFSIFWVLLIYVNVYLFGASGSLSIYGFLLIAYLLVKMSLSFFYKPFKGRAGQYKVAAIIPSYNEDAESLLETLKSVQQQTYPLAEIYVVDDGSADETGIKRIEDYVRDTGDLSSNVIVHRSEKNQGKRHAQAWAFERSDADVFLTVDSDTYIYPDALEELLKTFNDPTVFAATGHLNVRNRQTNLLTRLTDIRYDNAFGVERAAQSVTGNILVCSGPLSVYRREVVVPNIDRYINQTFLGIPVSIGDDRCLTNYATDLGKTVYQSTAKCITDVPDKMSTYLKQQNRWNKSFFRESIISVKKIMNNPFVALWTILEVSMFMMLVYSVVDFFVGNVREFDWLRVLAFLVIIFIVALCRNIHYMLKHPLSFLLSPFYGVLHLFVLQPLKLYSLFTIRNADWGTRKKLL

SEQ ID NO: 131 - protein, 417 aa, Streptococcus equisimilis
MRTLKNLITVVAFSIFWVLLIYVNVYLFGASGSLSIYGFLLIAYLLVKMSLSFFYKPFKGRAGQYKVAAIIPSYNEDAESLLETLKSVQQQTYPLAEIYVVDDGSADETGIKRIEDYVRDTGDLSSNVIVHRSEKNQGKRHAQAWAFERSDADVFLTVDSDTYIYPDALEELLKTFNDPTVFAATGHLNVRNRQTNLLTRLTDIRYDNAFGVERAAQSVTGNILVCSGPLSVYRREVVVPNIDRYINQTFLGIPVSIGDDRCLTNYATDLGKTVYQSTAKCITDVPDKMSTYLKQQNRWNKSFFRESIISVKKIMNNPFVALWTILEVSMFMMLVYSVVDFFVGNVREGDWLRVLAFLVIIFIVALCRNIHYMLKHPLSFLLSPFYGVLHLFVLQPLKLYSLFTIRNADWGTRKKLL

SEQ ID NO: 132 - protein, 417 aa, Streptococcus equisimilis
MRTLKNLITVVAFSIFWVLLIYVNVYLFGANGSLSIYGFLLIAYLLVKMSLSFFYKPFKGRAGQYKVAAIIPSYNEDAESLLETLKSVQQQTYPLAEIYVVDDGSADETGIKRIEDYVRDTGDLSSNVIVHRSEKNQGKRHAQAWAFERSDADVFLTVDSDTYIYPDALEELLKTFNDPTVFAATGHLNVRNRQTNLLTRLTDIRYDNAFGVERAAQSVTGNILVCSGPLSVYRREVVVPNIDRYINQTFLGIPVSIGDDRCLTNYATDLGKTVYQSTAKCITDVPDKMSTYLKQQNRWNKSFFRESIISVKKIMNNPFVALWTILEVSMFMMLVYSVVDFFVGNVREFDWLRVLAFLVIIFIVALCRNIHYMLKHPLSFLLSPFYGVLHLFVLQPLKLYSLFTIRNADWGTRKKLL

SEQ ID NO: 133 - protein, 417 aa, Streptococcus equisimilis
MRTLKNLITVVAFSIFWVLLIYVNVYLFGANGSLSIYGFLLIAYLLVKMSLSFFYKPFKGRAGQYKVAAIIPSYNEDAESLLETLKSVQQQTYPLAEIYVVDDGSADETGIKRIEDYVRDTGDLSSNVIVHRSEKNQGKRHAQAWAFERSDADVFLTVDSDTYIYPDALEELLKTFNDPTVFAATGHLNVRNRQTNLLTRLTDIRYDNAFGVERAAQSVTGNILVCSGPLSVYRREVVVPNIDRYINQTFLGIPVSIGDDRCLTNYATDLGKTVYQSTAKCITDVPDKMSTYLKQQNRWNKSFFRESIISVKKIMNNPFVALWTILEVSMFMMLVYSVVDFFVGNVREGDWLRVLAFLVIIFIVALCRNIHYMLKHPLSFLLSPFYGVLHLFVLQPLKLYSLFTIRNADWGTRKKLL

SEQ ID NO: 134 - protein, 417 aa, Streptococcus equisimilis
MRTLKNLITVVAFSIFWVLLIYVNVYLFGAYGSLSIYGFLLIAYLLVKMSLSFFYKPFKGRAGQYKVAAIIPSYNEDAESLLETLKSVQQQTYPLAEIYVVDDGSADETGIKRIEDYVRDTGDLSSNVIVHRSEKNQGKRHAQAWAFERSDADVFLTVDSDTYIYPDALEELLKTFNDPTVFAATGHLNVRNRQTNLLTRLTDIRYDNAFGVERAAQSVTGNILVCSGPLSVYRREVVVPNIDRYINQTFLGIPVSIGDDRCLTNYATDLGKTVYQSTAKCITDVPDKMSTYLKQQNRWNKSFFRESIISVKKIMNNPFVALWTILEVSMFMMLVYSVVDFFVGNVREFDWLRVLAFLVIIFIVALCRNIHYMLKHPLSFLLSPFYGVLHLFVLQPLKLYSLFTIRNADWGTRKKLL

SEQ ID NO: 135 - protein, 417 aa, Streptococcus equisimilis
MRTLKNLITVVAFSIFWVLLIYVNVYLFGAKGSLSIYGFLLIAYLLVKMSLSFFYKPFKGRAGQYKVAAIIPSYNEDAESLLETLKSVQQQTYPLAEIYVVDDGSADETGIKRIEDYVRDTGDLSSNVIVHRSEKNQGKRHAQAWAFERSDADVFLTVDSDTYIYPDALEELLKTFNDPTVFAATGHLNVRNRQTNLLTRLTDIRYDNAFGVERAAQSVTGNILVCSGPLSVYRREVVVPNIDRYINQTFLGIPVSIGDDRCLTNYAVDLGKTVYQSTAKCITDVPDKMSTYLKQQNRWNKSFFRESIISVKKIMNNPFVALWTILEVSMFMMLVYSVVDFFVGNVREFDWLRVLAFLVIIFIVALCRNIHYMLKHPLSFLLSPFYGVLHLFVLQPLKLYSLFTIRNADWGTRKKLL

SEQ ID NO: 136 - protein, 417 aa, Streptococcus equisimilis
MRTLKNLITVVAFSIFWVLLIYVNVYLFGAKGSLSIYGFLLIAYLLVKMSLSFFYKPFKGRAGQYKVAAIIPSYNEDAESLLETLKSVQQQTYPLAEIYVVDDGSADETGIKRIEDYVRDTGDLSSNVIVHRSEKNQGKRHAQAWAFERSDADVFLTVDSDTYIYPDALEELLKTFNDPTVFAATGHLNVRNRQTNLLTRLTDIRYDNAFGVERAAQSVTGNILVCSGPLSVYRREVVVPNIDRYINQTFLGIPVSIGDDRCLTNYAVDLGKTVYQSTAKCITDVPDKMSTYLKQQNRWNKSFFRESIISVKKIMNNPFVALWTILEVSMFMMLVYSVVDFFVGNVREGDWLRVLAFLVIIFIVALCRNIHYMLKHPLSFLLSPFYGVLHLFVLQPLKLYSLFTIRNADWGTRKKLL

SEQ ID NO: 137 - protein, 417 aa, Streptococcus equisimilis
MRTLKNLITVVAFSIFWVLLIYVNVYLFGAKGSLSIYGFLLIAYLLVKMSLSFFYKPFKGRAGQYKVAAIIPSYNEDAESLLETLKSVQQQTYPLAEIYVVDDGSADETGIKRIEDYVRDTGDLSSNVIVHRSEKNQGKRHAQAWAFERSDADVFLTVDSDTYIYPDALEELLKTFNDPTVFAATGHLNVRNRQTNLLTRLTDIRYDNAFGVERAAQSVTGNILVCSGPLSVYRREVVVPNIDRYINQTFLGIPVSIGDDRCLTNYAIDLGKTVYQSTAKCITDVPDKMSTYLKQQNRWNKSFFRESIISVKKIMNNPFVALWTILEVSMFMMLVYSVVDFFVGNVREFDWLRVLAFLVIIFIVALCRNIHYMLKHPLSFLLSPFYGVLHLFVLQPLKLYSLFTIRNADWGTRKKLL

SEQ ID NO: 138 - protein, 417 aa, Streptococcus equisimilis
MRTLKNLITVVAFSIFWVLLIYVNVYLFGAKGSLSIYGFLLIAYLLVKMSLSFFYKPFKGRAGQYKVAAIIPSYNEDAESLLETLKSVQQQTYPLAEIYVVDDGSADETGIKRIEDYVRDTGDLSSNVIVHRSEKNQGKRHAQAWAFERSDADVFLTVDSDTYIYPDALEELLKTFNDPTVFAATGHLNVRNRQTNLLTRLTDIRYDNAFGVERAAQSVTGNILVCSGPLSVYRREVVVPNIDRYINQTFLGIPVSIGDDRCLTNYAIDLGKTVYQSTAKCITDVPDKMSTYLKQQNRWNKSFFRESIISVKKIMNNPFVALWTILEVSMFMMLVYSVVDFFVGNVREGDWLRVLAFLVIIFIVALCRNIHYMLKHPLSFLLSPFYGVLHLFVLQPLKLYSLFTIRNADWGTRKKLL

SEQ ID NO: 139 - protein, 417 aa, Streptococcus equisimilis
MRTLKNLITVVAFSIFWVLLIYVNVYLFGAKGSLSIYGFLLIAYLLVKMSLSFFYKPFKGRAGQYKVAAIIPSYNEDAESLLETLKSVQQQTYPLAEIYVVDDGSADETGIKRIEDYVRDTGDLSSNVIVHRSEKNQGKRHAQAWAFERSDADVFLTVDSDTYIYPDALEELLKTFNDPTVFAATGHLNVRNRQTNLLTRLTDIRYDNAFGVERAAQSVTGNILVCSGPLSVYRREVVVPNIDRYINQTFLGIPVSIGDDRCLTNYALDLGKTVYQSTAKCITDVPDKMSTYLKQQNRWNKSFFRESIISVKKIMNNPFVALWTILEVSMFMMLVYSVVDFFVGNVREFDWLRVLAFLVIIFIVALCRNIHYMLKHPLSFLLSPFYGVLHLFVLQPLKLYSLFTIRNADWGTRKKLL

SEQ ID NO: 140 - protein, 417 aa, Streptococcus equisimilis
MRTLKNLITVVAFSIFWVLLIYVNVYLFGAKGSLSIYGFLLIAYLLVKMSLSFFYKPFKGRAGQYKVAAIIPSYNEDAESLLETLKSVQQQTYPLAEIYVVDDGSADETGIKRIEDYVRDTGDLSSNVIVHRSEKNQGKRHAQAWAFERSDADVFLTVDSDTYIYPDALEELLKTFNDPTVFAATGHLNVRNRQTNLLTRLTDIRYDNAFGVERAAQSVTGNILVCSGPLSVYRREVVVPNIDRYINQTFLGIPVSIGDDRCLTNYALDLGKTVYQSTAKCITDVPDKMSTYLKQQNRWNKSFFRESIISVKKIMNNPFVALWTILEVSMFMMLVYSVVDFFVGNVREGDWLRVLAFLVIIFIVALCRNIHYMLKHPLSFLLSPFYGVLHLFVLQPLKLYSLFTIRNADWGTRKKLL

SEQ ID NO: 141 - protein, 417 aa, Streptococcus equisimilis
MRTLKNLITVVAFSIFWVLLIYVNVYLFGAKGSLSIYGFLLIAYLLVKMSLSFFYKPFKGRAGQYKVAAIIPSYNEDAESLLETLKSVQQQTYPLAEIYVVDDGSADETGIKRIEDYVRDTGDLSSNVIVHRSEKNQGKRHAQAWAFERSDADVFLTVDSDTYIYPDALEELLKTFNDPTVFAATGHLNVRNRQTNLLTRLTDIRYDNAFGVERAAQSVTGNILVCSGPLSVYRREVVVPNIDRYINQTFLGIPVSIGDDRCLTNYATDLGKTVYQSTAKCITDVPDKMSTYLKQQNRWNKSFFRESIISVKKIMNIPFVALWTILEVSMFMMLVYSVVDFFVGNVREFDWLRVLAFLVIIFIVALCRNIHYMLKHPLSFLLSPFYGVLHLFVLQPLKLYSLFTIRNADWGTRKKLL

SEQ ID NO: 142 - protein, 417 aa, Streptococcus equisimilis
MRTLKNLITVVAFSIFWVLLIYVNVYLFGAKGSLSIYGFLLIAYLLVKMSLSFFYKPFKGRAGQYKVAAIIPSYNEDAESLLETLKSVQQQTYPLAEIYVVDDGSADETGIKRIEDYVRDTGDLSSNVIVHRSEKNQGKRHAQAWAFERSDADVFLTVDSDTYIYPDALEELLKTFNDPTVFAATGHLNVRNRQTNLLTRLTDIRYDNAFGVERAAQSVTGNILVCSGPLSVYRREVVVPNIDRYINQTFLGIPVSIGDDRCLTNYATDLGKTVYQSTAKCITDVPDKMSTYLKQQNRWNKSFFRESIISVKKIMNIPFVALWTILEVSMFMMLVYSVVDFFVGNVREGDWLRVLAFLVIIFIVALCRNIHYMLKHPLSFLLSPFYGVLHLFVLQPLKLYSLFTIRNADWGTRKKLL

SEQ ID NO: 143 - protein, 417 aa, Streptococcus equisimilis
MRTLKNLITVVAFSIFWVLLIYVNVYLFGAKGSLSIYGFLLIAYLLVKMSLSFFYKPFKGRAGQYKVAAIIPSYNEDAESLLETLKSVQQQTYPLAEIYVVDDGSADETGIKRIEDYVRDTGDLSSNVIVHRSEKNQGKRHAQAWAFERSDADVFLTVDSDTYIYPDALEELLKTFNDPTVFAATGHLNVRNRQTNLLTRLTDIRYDNAFGVERAAQSVTGNILVCSGPLSVYRREVVVPNIDRYINQTFLGIPVSIGDDRCLTNYATDLGKTVYQSTAKCITDVPDKMSTYLKQQNRWNKSFFRESIISVKKIMNKPFVALWTILEVSMFMMLVYSVVDFFVGNVREFDWLRVLAFLVIIFIVALCRNIHYMLKHPLSFLLSPFYGVLHLFVLQPLKLYSLFTIRNADWGTRKKLL

SEQ ID NO: 144 - protein, 417 aa, Streptococcus equisimilis
MRTLKNLITVVAFSIFWVLLIYVNVYLFGAKGSLSIYGFLLIAYLLVKMSLSFFYKPFKGRAGQYKVAAIIPSYNEDAESLLETLKSVQQQTYPLAEIYVVDDGSADETGIKRIEDYVRDTGDLSSNVIVHRSEKNQGKRHAQAWAFERSDADVFLTVDSDTYIYPDALEELLKTFNDPTVFAATGHLNVRNRQTNLLTRLTDIRYDNAFGVERAAQSVTGNILVCSGPLSVYRREVVVPNIDRYINQTFLGIPVSIGDDRCLTNYATDLGKTVYQSTAKCITDVPDKMSTYLKQQNRWNKSFFRESIISVKKIMNKPFVALWTILEVSMFMMLVYSVVDFFVGNVREGDWLRVLAFLVIIFIVALCRNIHYMLKHPLSFLLSPFYGVLHLFVLQPLKLYSLFTIRNADWGTRKKLL

SEQ ID NO: 145 - protein, 417 aa, Streptococcus equisimilis
MRTLKNLITVVAFSIFWVLLIYVNVYLFGAKGSLSIYGFLLIAYLLVKMSLSFFYKPFKGRAGQYKVAAIIPSYNEDAESLLETLKSVQQQTYPLAEIYVVDDGSADETGIKRIEDYVRDTGDLSSNVIVHRSEKNQGKRHAQAWAFERSDADVFLTVDSDTYIYPDALEELLKTFNDPTVFAATGHLNVRNRQTNLLTRLTDIRYDNAFGVERAAQSVTGNILVCSGPLSVYRREVVVPNIDRYINQTFLGIPVSIGDDRCLTNYATDLGKTVYQSTAKCITDVPDKMSTYLKQQNRWNKSFFRESIISVKKIMNTPFVALWTILEVSMFMMLVYSVVDFFVGNVREFDWLRVLAFLVIIFIVALCRNIHYMLKHPLSFLLSPFYGVLHLFVLQPLKLYSLFTIRNADWGTRKKLL

SEQ ID NO: 146 - protein, 417 aa, Streptococcus equisimilis
MRTLKNLITVVAFSIFWVLLIYVNVYLFGAKGSLSIYGFLLIAYLLVKMSLSFFYKPFKGRAGQYKVAAIIPSYNEDAESLLETLKSVQQQTYPLAEIYVVDDGSADETGIKRIEDYVRDTGDLSSNVIVHRSEKNQGKRHAQAWAFERSDADVFLTVDSDTYIYPDALEELLKTFNDPTVFAATGHLNVRNRQTNLLTRLTDIRYDNAFGVERAAQSVTGNILVCSGPLSVYRREVVVPNIDRYINQTFLGIPVSIGDDRCLTNYATDLGKTVYQSTAKCITDVPDKMSTYLKQQNRWNKSFFRESIISVKKIMNRPFVALWTILEVSMFMMLVYSVVDFFVGNVREFDWLRVLAFLVIIFIVALCRNIHYMLKHPLSFLLSPFYGVLHLFVLQPLKLYSLFTIRNADWGTRKKLL

SEQ ID NO: 147 - protein, 417 aa, Streptococcus equisimilis
MRTLKNLITVVAFSIFWVLLIYVNVYLFGAKGSLSIYGFLLIAYLLVKMSLSFFYKPFKGRAGQYKVAAIIPSYNEDAESLLETLKSVQQQTYPLAEIYVVDDGSADETGIKRIEDYVRDTGDLSSNVIVHRSEKNQGKRHAQAWAFERSDADVFLTVDSDTYIYPDALEELLKTFNDPTVFAATGHLNVRNRQTNLLTRLTDIRYDNAFGVERAAQSVTGNILVCSGPLSVYRREVVVPNIDRYINQTFLGIPVSIGDDRCLTNYATDLGKTVYQSTAKCITDVPDKMSTYLKQQNRWNKSFFRESIISVKKIMNNPFVALWTILEVSMFMMLVYSVVDFFVNNVREFDWLRVLAFLVIIFIVALCRNIHYMLKHPLSFLLSPFYGVLHLFVLQPLKLYSLFTIRNADWGTRKKLL

SEQ ID NO: 148 - protein, 417 aa, Streptococcus equisimilis
MRTLKNLITVVAFSIFWVLLIYVNVYLFGAKGSLSIYGFLLIAYLLVKMSLSFFYKPFKGRAGQYKVAAIIPSYNEDAESLLETLKSVQQQTYPLAEIYVVDDGSADETGIKRIEDYVRDTGDLSSNVIVHRSEKNQGKRHAQAWAFERSDADVFLTVDSDTYIYPDALEELLKTFNDPTVFAATGHLNVRNRQTNLLTRLTDIRYDNAFGVERAAQSVTGNILVCSGPLSVYRREVVVPNIDRYINQTFLGIPVSIGDDRCLTNYATDLGKTVYQSTAKCITDVPDKMSTYLKQQNRWNKSFFRESIISVKKIMNNPFVALWTILEVSMFMMLVYSVVDFFVDNVREFDWLRVLAFLVIIFIVALCRNIHYMLKHPLSFLLSPFYGVLHLFVLQPLKLYSLFTIRNADWGTRKKLL

SEQ ID NO: 149 - protein, 417 aa, Streptococcus equisimilis
MRTLKNLITVVAFSIFWVLLIYVNVYLFGAKGSLSIYGFLLIAYLLVKMSLSFFYKPFKGRAGQYKVAAIIPSYNEDAESLLETLKSVQQQTYPLAEIYVVDDGSADETGIKRIEDYVRDTGDLSSNVIVHRSEKNQGKRHAQAWAFERSDADVFLTVDSDTYIYPDALEELLKTFNDPTVFAATGHLNVRNRQTNLLTRLTDIRYDNAFGVERAAQSVTGNILVCSGPLSVYRREVVVPNIDRYINQTFLGIPVSIGDDRCLTNYATDLGKTVYQSTAKCITDVPDKMSTYLKQQNRWNKSFFRESIISVKKIMNNPFVALWTILEVSMFMMLVYSVVDFFVENVREFDWLRVLAFLVIIFIVALCRNIHYMLKHPLSFLLSPFYGVLHLFVLQPLKLYSLFTIRNADWGTRKKLL

SEQ ID NO: 150 - protein, 417 aa, Streptococcus equisimilis
MRTLKNLITVVAFSIFWVLLIYVNVYLFGAKGSLSIYGFLLIAYLLVKMSLSFFYKPFKGRAGQYKVAAIIPSYNEDAESLLETLKSVQQQTYPLAEIYVVDDGSADETGIKRIEDYVRDTGDLSSNVIVHRSEKNQGKRHAQAWAFERSDADVFLTVDSDTYIYPDALEELLKTFNDPTVFAATGHLNVRNRQTNLLTRLTDIRYDNAFGVERAAQSVTGNILVCSGPLSVYRREVVVPNIDRYINQTFLGIPVSIGDDRCLTNYATDLGKTVYQSTAKCITDVPDKMSTYLKQQNRWNKSFFRESIISVKKIMNNPFVALWTILEVSMFMMLVYSVVDFFVKNVREFDWLRVLAFLVIIFIVALCRNIHYMLKHPLSFLLSPFYGVLHLFVLQPLKLYSLFTIRNADWGTRKKLL

SEQ ID NO: 151 - protein, 417 aa, Streptococcus equisimilis
MRTLKNLITVVAFSIFWVLLIYVNVYLFGAKGSLSIYGFLLIAYLLVKMSLSFFYKPFKGRAGQYKVAAIIPSYNEDAESLLETLKSVQQQTYPLAEIYVVDDGSADETGIKRIEDYVRDTGDLSSNVIVHRSEKNQGKRHAQAWAFERSDADVFLTVDSDTYIYPDALEELLKTFNDPTVFAATGHLNVRNRQTNLLTRLTDIRYDNAFGVERAAQSVTGNILVCSGPLSVYRREVVVPNIDRYINQTFLGIPVSIGDDRCLTNYAIDLGKTVYQSTAKCITDVPDKMSTYLKQQNRWNKSFFRESIISVKKIMNIPFVALWTILEVSMFMMLVYSVVDFFVGNVREGDWLRVLAFLVIIFIVALCRNIHYMLKHPLSFLLSPFYGVLHLFVLQPLKLYSLFTIRNADWGTRKKLL

SEQ ID NO: 152 - protein, 417 aa, Streptococcus equisimilis
MRTLKNLITVVAFSIFWVLLIYVNVYLFGAKGSLSIYGFLLIAYLLVKMSLSFFYKPFKGRAGQYKVAAIIPSYNEDAESLLETLKSVQQQTYPLAEIYVVDDGSADETGIKRIEDYVRDTGDLSSNVIVHRSEKNQGKRHAQAWAFERSDADVFLTVDSDTYIYPDALEELLKTFNDPTVFAATGHLNVRNRQTNLLTRLTDIRYDNAFGVERAAQSVTGNILVCSGPLSVYRREVVVPNIDRYINQTFLGIPVSIGDDRCLTNYAIDLGKTVYQSTAKCITDVPDKMSTYLKQQNRWNKSFFRESIISVKKIMNTPFVALWTILEVSMFMMLVYSVVDFFVGNVREGDWLRVLAFLVIIFIVALCRNIHYMLKHPLSFLLSPFYGVLHLFVLQPLKLYSLFTIRNADWGTRKKLL

SEQ ID NO: 153 - protein, 417 aa, Streptococcus equisimilis
MRTLKNLITVVAFSIFWVLLIYVNVYLFGAKGSLSIYGFLLIAYLLVKMSLSFFYKPFKGRAGQYKVAAIIPSYNEDAESLLETLKSVQQQTYPLAEIYVVDDGSADETGIKRIEDYVRDTGDLSSNVIVHRSEKNQGKRHAQAWAFERSDADVFLTVDSDTYIYPDALEELLKTFNDPTVFAATGHLNVRNRQTNLLTRLTDIRYDNAFGVERAAQSVTGNILVCSGPLSVYRREVVVPNIDRYINQTFLGIPVSIGDDRCLTNYAIDLGKTVYQSTAKCITDVPDKMSTYLKQQNRWNKSFFRESIISVKKIMNRPFVALWTILEVSMFMMLVYSVVDFFVGNVREGDWLRVLAFLVIIFIVALCRNIHYMLKHPLSFLLSPFYGVLHLFVLQPLKLYSLFTIRNADWGTRKKLL

SEQ ID NO: 154 - protein, 342 aa, Streptococcus equisimilis
MRTLKNLITVVAFSIFWVLLIYVNVYLFGAKGSLSIYGFLLIAYLLVKMSLSFFYKPFKGRAGQYKVAAIIPSYNEDAESLLETLKSVQQQTYPLAEIYVVDDGSADETGIKRIEDYVRDTGDLSSNVIVHRSEKNQGKRHAQAWAFERSDADVFLTVDSDTYIYPDALEELLKTFNDPTVFAATGHLNVRNRQTNLLTRLTDIRYDNAFGVERAAQSVTGNILVCSGPLSVYRREVVVPNIDRYINQTFLGIPVSIGDDRCLTNYAIDLGKTVYQSTAKCITDVPDKMSTYLKQQNRWNKSFFRESIISVKKIMNNPFVALWTILEVSMFMMLVYSVVDFF

SEQ ID NO: 155 - protein, 417 aa, Streptococcus equisimilis
MRTLKNLITVVAFSIFWVLLIYVNVYLFGAKGSLSIYGFLLIAYLLVKMSLSFFYKPFKGRAGQYKVAAIIPSYNEDAESLLETLKSVQQQTYPLAEIYVVDDGSADETGIKRIEDYVRDTGDLSSNVIVHRSEKNQGKRHAQAWAFERSDADVFLTVDSDTYIYPDALEELLKTFNDPTVFAATGHLNVRNRQTNLLTRLTDIRYDNAFGVERAAQSVTGNILVCSGPLSVYRREVVVPNIDRYINQTFLGIPVSIGDDRCLTNYAIDLGKTVYQSTAKCITDVPDKMSTYLKQQNRWNKSFFRESIISVKKIMNNPFVALWTILEVSMFMMLVYSVVDFFVKNVREGDWLRVLAFLVIIFIVALCRNIHYMLKHPLSFLLSPFYGVLHLFVLQPLKLYSLFTIRNADWGTRKKLL

SEQ ID NO: 156 - protein, 417 aa, Streptococcus equisimilis
MRTLKNLITVVAFSIFWVLLIYVNVYLFGAKGSLSIYGFLLIAYLLVKMSLSFFYKPFKGRAGQYKVAAIIPSYNEDAESLLETLKSVQQQTYPLAEIYVVDDGSADETGIKRIEDYVRDTGDLSSNVIVHRSEKNQGKRHAQAWAFERSDADVFLTVDSDTYIYPDALEELLKTFNDPTVFAATGHLNVRNRQTNLLTRLTDIRYDNAFGVERAAQSVTGNILVCSGPLSVYRREVVVPNIDRYINQTFLGIPVSIGDDRCLTNYAIDLGKTVYQSTAKCITDVPDKMSTYLKQQNRWNKSFFRESIISVKKIMNNPFVALWTILEVSMFMMLVYSVVDFFVENVREGDWLRVLAFLVIIFIVALCRNIHYMLKHPLSFLLSPFYGVLHLFVLQPLKLYSLFTIRNADWGTRKKLL

SEQ ID NO: 157 - protein, 417 aa, Streptococcus equisimilis
MRTLKNLITVVAFSIFWVLLIYVNVYLFGAKGSLSIYGFLLIAYLLVKMSLSFFYKPFKGRAGQYKVAAIIPSYNEDAESLLETLKSVQQQTYPLAEIYVVDDGSADETGIKRIEDYVRDTGDLSSNVIVHRSEKNQGKRHAQAWAFERSDADVFLTVDSDTYIYPDALEELLKTFNDPTVFAATGHLNVRNRQTNLLTRLTDIRYDNAFGVERAAQSVTGNILVCSGPLSVYRREVVVPNIDRYINQTFLGIPVSIGDDRCLTNYAIDLGKTVYQSTAKCITDVPDKMSTYLKQQNRWNKSFFRESIISVKKIMNKPFVALWTILEVSMFMMLVYSVVDFFVGNVREGDWLRVLAFLVIIFIVALCRNIHYMLKHPLSFLLSPFYGVLHLFVLQPLKLYSLFTIRNADWGTRKKLL

SEQ ID NO: 158 - protein, 417 aa, Streptococcus equisimilis
MRTLKNLITVVAFSIFWVLLIYVNVYLFGAKGSLSIYGFLLIAYLLVKMSLSFFYKPFKGRAGQYKVAAIIPSYNEDAESLLETLKSVQQQTYPLAEIYVVDDGSADETGIKRIEDYVRDTGDLSSNVIVHRSEKNQGKRHAQAWAFERSDADVFLTVDSDTYIYPDALEELLKTFNDPTVFAATGHLNVRNRQTNLLTRLTDIRYDNAFGVERAAQSVTGNILVCSGPLSVYRREVVVPNIDRYINQTFLGIPVSIGDDRCLTNYAIDLGKTVYQSTAKCITDVPDKMSTYLKQQNRWNKSFFRESIISVKKIMNKPFVALWTILEVSMFMMLVYSVVDFFVKNVREGDWLRVLAFLVIIFIVALCRNIHYMLKHPLSFLLSPFYGVLHLFVLQPLKLYSLFTIRNADWGTRKKLL

SEQ ID NO: 159 - protein, 417 aa, Streptococcus equisimilis
MRTLKNLITVVAFSIFWVLLIYVNVYLFGAKGSLSIYGFLLIAYLLVKMSLSFFYKPFKGRAGQYKVAAIIPSYNEDAESLLETLKSVQQQTYPLAEIYVVDDGSADETGIKRIEDYVRDTGDLSSNVIVHRSEKNQGKRHAQAWAFERSDADVFLTVDSDTYIYPDALEELLKTFNDPTVFAATGHLNVRNRQTNLLTRLTDIRYDNAFGVERAAQSVTGNILVCSGPLSVYRREVVVPNIDRYINQTFLGIPVSIGDDRCLTNYAIDLGKTVYQSTAKCITDVPDKMSTYLKQQNRWNKSFFRESIISVKKIMNRPFVALWTILEVSMFMMLVYSVVDFFVKNVREGDWLRVLAFLVIIFIVALCRNIHYMLKHPLSFLLSPFYGVLHLFVLQPLKLYSLFTIRNADWGTRKKLL

SEQ ID NO: 160 - protein, 417 aa, Streptococcus equisimilis
MRTLKNLITVVAFSIFWVLLIYVNVYLFGAKGSLSIYGFLLIAYLLVKMSLSFFYKPFKGRAGQYKVAAIIPSYNEDAESLLETLKSVQQQTYPLAEIYVVDDGSADETGIKRIEDYVRDTGDLSSNVIVHRSEKNQGKRHAQAWAFERSDADVFLTVDSDTYIYPDALEELLKTFNDPTVFAATGHLNVRNRQTNLLTRLTDIRYDNAFGVERAAQSVTGNILVCSGPLSVYRREVVVPNIDRYINQTFLGIPVSIGDDRCLTNYAIDLGKTVYQSTAKCITDVPDKMSTYLKQQNRWNKSFFRESIISVKKIMNTPFVALWTILEVSMFMMLVYSVVDFFVKNVREGDWLRVLAFLVIIFIVALCRNIHYMLKHPLSFLLSPFYGVLHLFVLQPLKLYSLFTIRNADWGTRKKLL

SEQ ID NO: 161 - DNA, 33 bp, Artificial Sequence
  Oligonucleotide used to make seHAS C226A mutant
ggtaatatccttgttgcctcaggtccgcttagc

SEQ ID NO: 162 - DNA, 33 bp, Artificial Sequence
  Oligo used to make seHAS C226S mutant
ggtaatatccttgtttcctcaggtccgcttagc

SEQ ID NO: 163 - DNA, 33 bp, Artificial Sequence
  Oligo used to make seHAS C262A mutant
attggtgatgacagggccttgaccaactatgca

SEQ ID NO: 164 - DNA, 33 bp, Artificial Sequence
  Oligo used to make seHAS C226S mutant
attggtgatgacaggtccttgaccaactatgca

SEQ ID NO: 165 - DNA, 33 bp, Artificial Sequence
  Oligo used to make seHAS C281A mutant
caatccactgctaaagctattacagatgttcct

SEQ ID NO: 166 - DNA, 33 bp, Artificial Sequence
  Oligo used to make seHASC281S mutant
caatccactgctaaatctattacagatgttcct

SEQ ID NO: 167 - DNA, 33 bp, Artificial Sequence
  Oligo used to make seHAS C367A mutant
ttcattgttgccctggctcggaacattcattac

SEQ ID NO: 168 - DNA, 33 bp, Artificial Sequence
  Oligo used to make seHAS C367S mutant
ttcattgttgccctgtctcggaacattcattac

SEQ ID NO: 169 - DNA, 22 bp, Artificial Sequence
  Oligo used to make spHAS C124S mutant
taacgtttcgagaaatatccac

SEQ ID NO: 170 - DNA, 20 bp, Artificial Sequence
  Oligo used to make spHASC225S mutant
ggtcctgaggaaactaaaat

SEQ ID NO: 171 - DNA, 21 bp, Artificial Sequence
  Oligo used to make spHAS C261S mutant
atttgttaaagatcgatcatc

SEQ ID NO: 172 - DNA, 21 bp, Artificial Sequence
  Oligo used to make spHASC280S mutant
atcagtatcagatctagctgt

SEQ ID NO: 173 - DNA, 21 bp, Artificial Sequence
  Oligo used to make spHASC366S mutant
aacattacgagataaagcaac

SEQ ID NO: 174 - DNA, 21 bp, Artificial Sequence
  Oligo used to make spHAS C402S mutant
tttaatggtggataaagaata

SEQ ID NO: 175 - DNA, 33 bp, Artificial Sequence
  Oligo used to make spHAS C124A mutant
aacgataacgtttcgagcaatatccacttctct

SEQ ID NO: 176 - DNA, 30 bp, Artificial Sequence
  Oligo used to make spHAS C225A mutant
caatggtcctgaggcaactaaaatattacc

SEQ ID NO: 177 - DNA, 33 bp, Artificial Sequence
  Oligo used to make spHAS C261A mutant
agcataatttgttaaagctcgatcatccccaat

SEQ ID NO: 178 - DNA, 33 bp, Artificial Sequence
  Oligo used to make spHAS C280A mutant
aggtacatcagtatcagctctagctgttgattg

SEQ ID NO: 179 - DNA, 21 bp, Artificial Sequence
  Oligo used to make spHAS C366A mutant
aacattacgagctaaagcaac

SEQ ID NO: 180 - DNA, 33 bp, Artificial Sequence
  Oligo used to make spHAS C402A mutant
cgtatttttaatggtggctaaagaataaagttt

SEQ ID NO: 181 - DNA, 48 bp, Artificial Sequence
  Oligos used to make seHAS 51LSF53 mutants
cctattagtcaaaatgtccwywwywwywttttacaagccatttaaggg

SEQ ID NO: 182 - DNA, 45 bp, Artificial Sequence
  Oligos used to make seHAS k31 mutants
caatgtttatctctttggtgctwmcggaagcttgtcaatttatgg

SEQ ID NO: 183 - DNA, 45 bp, Artificial Sequence
  Oligos used to make seHAS T268 mutants
  misc_feature (21)..(21): n is a, c, g, or t
ggtgcttgaccaactatgcantcgatttaggaaagactgtttatc

SEQ ID NO: 184 - DNA, 44 bp, Artificial Sequence
  Oligos used to make seHAS N317 mutants
  misc_feature (22)..(22): n is a, c, g, or t
ctgttaagaaaatcatgaacanaccttttgtagccctatggacc

SEQ ID NO: 185 - DNA, 43 bp, Artificial Sequence
  Oligos used to make seHAs G344 mutants
ctgtggtggatttctttgtarasaatgtcagagaatttgattg

SEQ ID NO: 186 - DNA, 45 bp, Artificial Sequence
  Oligos used to make seHAS F349 mutants
ctttgtaggcaatgtcagagaakrcgattggctcagggttttagc

What is claimed is:

1. A functionally active hyaluronan synthase having an altered enzymatic activity as compared to a corresponding functionally active native hyaluronan synthase, wherein the functionally active hyaluronan synthase has at least one modified amino acid residue therein as compared to the corresponding functionally active native hyaluronan synthase.

2. The functionally active hyaluronan synthase of claim 1, wherein the corresponding functionally active native hyaluronan synthase is selected from the group consisting of spHAS, seHAS, suHAS and pmHAS.

3. The functionally active hyaluronan synthase of claim 2, wherein the corresponding functionally active native hyaluronan synthase has an amino acid sequence essentially as set forth in at least one of SEQ ID NOS:2, 4, 6, 8, 10, 12 and 14.

4. The functionally active hyaluronan synthase of claim 1, wherein the at least one modified amino acid residue is selected from the group consisting of an asparagine, a cysteine, a glycine, a lysine, a phenylalanine, a threonine, and combinations thereof.

5. The functionally active hyaluronan synthase of claim 1, wherein the functionally active hyaluronan synthase having an altered enzymatic activity has an amino acid sequence essentially as set forth in at least one of SEQ ID NOS:93-160.

6. The functionally active hyaluronan synthase of claim 1, wherein the functionally active hyaluronan synthase having an altered enzymatic activity has an increased enzymatic activity when compared to the corresponding functionally active native hyaluronan synthase.

7. The functionally active hyaluronan synthase of claim 1, wherein the functionally active hyaluronan synthase having an altered enzymatic activity has a decreased enzymatic activity when compared to the corresponding functionally active native hyaluronan synthase.

8. The functionally active hyaluronan synthase of claim 1, wherein the functionally active hyaluronan synthase having an altered enzymatic activity produces hyaluronic acid having an average molecular mass that is less than an average molecular mass of hyaluronic acid produced by the corresponding functionally active native hyaluronan synthase.

9. The functionally active hyaluronan synthase of claim 1, wherein the functionally active hyaluronan synthase having an altered enzymatic activity produces hyaluronic acid having an average molecular mass that is greater than an average molecular mass of hyaluronic acid produced by the corresponding functionally active native hyaluronan synthase.

10. A recombinant host cell having a functionally active hyaluronan synthase having an altered enzymatic activity as compared to a corresponding functionally active native hyaluronan synthase incorporated therein such that the host cell is capable of producing hyaluronan, wherein the functionally active hyaluronan synthase has at least one modified amino acid residue therein as compared to the corresponding functionally active native hyaluronan synthase.

11. The recombinant host cell of claim 10, wherein the corresponding functionally active native hyaluronan synthase is selected from the group consisting of spHAS, seHAS, suHAS and pmHAS.

12. The recombinant host cell of claim 11, wherein the corresponding functionally active native hyaluronan synthase has an amino acid sequence essentially as set forth in at least one of SEQ ID NOS:2, 4, 6, 8, 10, 12 and 14.

13. The recombinant host cell of claim 10, wherein the at least one modified amino acid residue is selected from the group consisting of an asparagine, a cysteine, a glycine, a lysine, a phenylalanine, a threonine, and combinations thereof.

14. The recombinant host cell of claim 10, wherein the functionally active hyaluronan synthase having an altered enzymatic activity has an amino acid sequence essentially as set forth in at least one of SEQ ID NOS:93-160.

15. The recombinant host cell of claim 10, wherein the functionally active hyaluronan synthase having an altered enzymatic activity has an increased enzymatic activity when compared to the corresponding functionally active native hyaluronan synthase.

16. The recombinant host cell of claim 10, wherein the functionally active hyaluronan synthase having an altered enzymatic activity has a decreased enzymatic activity when compared to the corresponding functionally active native hyaluronan synthase.

17. The recombinant host cell of claim 10, wherein the functionally active hyaluronan synthase having an altered enzymatic activity produces hyaluronic acid having an average molecular mass that is less than an average molecular mass of hyaluronic acid produced by the corresponding functionally active native hyaluronan synthase.

18. The recombinant host cell of claim 10, wherein the functionally active hyaluronan synthase having an altered enzymatic activity produces hyaluronic acid having an average molecular mass that is greater than an average molecular mass of hyaluronic acid produced by the corresponding functionally active native hyaluronan synthase.

19. The recombinant host cell of claim 10, wherein the recombinant host cell is a Bacillus cell.

20. The recombinant host cell of claim 19, wherein the recombinant host cell is selected from the group consisting of Bacillus alkalophilus, Bacillus amyloliquefaciens, Bacillus brevis, Bacillus circulans, Bacillus clausii, Bacillus coagulans, Bacillus firmus, Bacillus lautus, Bacillus lentus, Bacillus licheniformis, Bacillus metaterium, Bacillus pumilus, Bacillus stearothermophilus, Bacillus subtilis and Bacillus thuringienisis.

21. A method of providing a functionally active hyaluronan synthase having an altered enzymatic activity as compared to a corresponding functionally active native hyaluronan synthase, comprising the steps of:
providing a hyaluronan synthase; and
modifying at least one amino acid residue of the hyaluronan synthase to provide a functionally active hyaluronan synthase having an altered enzymatic activity.

22. The method of claim 21, wherein the corresponding functionally active native hyaluronan synthase is selected from the group consisting of spHAS, seHAS, suHAS and pmHAS.

23. The method of claim 22, wherein the corresponding functionally active native hyaluronan synthase has an amino acid sequence essentially as set forth in at least one of SEQ ID NOS:2, 4, 6, 8, 10, 12 and 14.

24. The method of claim 21 wherein, in the step of modifying at least one amino acid residue, the at least one modified amino acid residue is selected from the group consisting of an asparagine, a cysteine, a glycine, a lysine, a phenylalanine, a threonine, and combinations thereof.

25. The method of claim 21, wherein the functionally active hyaluronan synthase having an altered enzymatic activity has an amino acid sequence essentially as set forth in at least one of SEQ ID NOS:93-160.

26. The method of claim 21, wherein the functionally active hyaluronan synthase having an altered enzymatic activity has an increased enzymatic activity when compared to the corresponding functionally active native hyaluronan synthase.

27. The method of claim 21, wherein the functionally active hyaluronan synthase having an altered enzymatic activity has a decreased enzymatic activity when compared to the corresponding functionally active native hyaluronan synthase.

28. The method of claim 21, wherein the functionally active hyaluronan synthase having an altered enzymatic activity produces hyaluronic acid having an average molecular mass that is less than an average molecular mass of hyaluronic acid produced by the corresponding functionally active native hyaluronan synthase.

29. The method of claim 21, wherein the functionally active hyaluronan synthase having an altered enzymatic activity produces hyaluronic acid having an average molecular mass that is greater than an average molecular mass of hyaluronic acid produced by the corresponding functionally active native hyaluronan synthase.

30. A method for producing hyaluronic acid, comprising the steps of:
providing a recombinant host cell having at least one expression construct comprising a hyaluronan synthase gene encoding a functionally active hyaluronan synthase incorporated therein such that the host cell is capable of producing hyaluronan, wherein the functionally active hyaluronan synthase has at least one modified amino acid residue therein as compared to a corresponding functionally active native hyaluronan synthase such that the functionally active hyaluronan synthase has an altered enzymatic activity as compared to the corresponding functionally active native hyaluronan synthase; and
culturing the host cell under conditions appropriate for the production of hyaluronic acid.

31. The method of claim 30, wherein the corresponding functionally active native hyaluronan synthase is selected from the group consisting of spHAS, seHAS, suHAS and pmHAS.

32. The method of claim 31, wherein the corresponding functionally active native hyaluronan synthase has an amino acid sequence essentially as set forth in at least one of SEQ ID NOS:2, 4, 6, 8, 10, 12 and 14.

33. The method of claim 30, wherein the at least one modified amino acid residue is selected from the group consisting of an asparagine, a cysteine, a glycine, a lysine, a phenylalanine, a threonine, and combinations thereof.

34. The method of claim 30, wherein the functionally active hyaluronan synthase having an altered enzymatic activity has an amino acid sequence essentially as set forth in at least one of SEQ ID NOS:93-160.

35. The method of claim 30, wherein the functionally active hyaluronan synthase having an altered enzymatic activity has an increased enzymatic activity when compared to the corresponding functionally active native hyaluronan synthase.

36. The method of claim 30, wherein the functionally active hyaluronan synthase having an altered enzymatic activity has a decreased enzymatic activity when compared to the corresponding functionally active native hyaluronan synthase.

37. The method of claim 30, wherein the functionally active hyaluronan synthase having an altered enzymatic activity produces hyaluronic acid having an average molecular mass that is less than an average molecular mass of hyaluronic acid produced by the corresponding functionally active native hyaluronan synthase.

38. The method of claim 30, wherein the functionally active hyaluronan synthase having an altered enzymatic activity produces hyaluronic acid having an average molecular mass that is greater than an average molecular mass of hyaluronic acid produced by the corresponding functionally active native hyaluronan synthase.

39. The method of claim 30, further comprising the step of separating the hyaluronic acid from the host cell.

40. The method of claim 30, wherein the recombinant host cell further comprises at least one gene encoding an enzyme for synthesis of a hyaluronic acid sugar precursor.

41. The method of claim 30, wherein the at least one gene encoding an enzyme for synthesis of a hyaluronic acid sugar precursor is selected from the group consisting of a pyrophosphorylase, a transferase, a mutase, a dehydrogenase, an epimerase capable of increasing production of UDP-GlcNAc or UDP-GlcUA, and combinations thereof.

42. The method of claim 30, wherein nutrients utilized for a hyaluronic acid sugar precursor biosynthetic pathway are supplied to the host cell.

43. The method of claim 30, wherein the recombinant host cell is a Bacillus cell.

44. The method of claim 43, wherein the recombinant host cell is selected from the group consisting of Bacillus alkalophilus, Bacillus amyloliquefaciens, Bacillus brevis, Bacillus circulans, Bacillus clausii, Bacillus coagulans, Bacillus firmus, Bacillus lautus, Bacillus lentus, Bacillus licheniformis, Bacillus metaterium, Bacillus pumilus, Bacillus stearothermophilus, Bacillus subtilis and Bacillus thuringienisis.
